United States Patent Application Publication US 2026/0191916 A1 - sequence listing, part 58

SEQ ID NO: 278 - DNA, 2283419 bp, UBA1417 FBI02365
  source 1..2283419: mol_type = genomic DNA
tatgctcatggttcgctgcggtcttgaccccgccggagcctttgaggatgaggattttcgggatgtgctgaattttaacacgccggaaaccctcaacgccctgggcgtggccaccggcgacatttcccagatgtgcctttccgagatttcccgcaccgtcctcgccctgcaaagacagccccaaaaagaaaatcgcacatttgccggccagccgcaaatccagtatgctgtaactgaacagaaaaaccagccgccagaaaggagttttgagaatgaacgggatcacatacacgaggcagggcgactacaacctgccgaaccttctgcccccgcaggaggggccggttccccatgggaaatacgcattgcttcggaagaagtttctgaaagaacacaggcgaatcacctacacgaacctgctgaccagcgggcagctctccagccacctgtcggagatcgagcagacggcccagcgccagatggagcaactcgtgacgcagatggcgaaagccgagggcgtgacggaggagctgaaggagcgcgacccgatgaagtgggtggggctgatgaacaaccttcagaacgcagcggaggagatcgtactgaaagagctgatttacagctaatttccgaaccggaacagcccagccccttaaatgcagaggaagcggacagcccagagctgcccgcttttttggatgaaaggcagatcatggccgtcattgccaataaggacgacagcctcaagtataagaaacagcagatcgagcttttcttctctgtccacccggatacgcaggaacgggccgattatctgaaaacagcctaccaggacaggtacaccgaaatcatggcggacggccagcgcctgggatataagccgcaggaagacgggcttctcatgtgggaaggctcttacccatcccgcaccaaagaagccgtgttttcctgggggttggtggcggaatggacggcccagctcatcaataaaaaagaatatttcatccagacggacatcccaaggctccccacccaggagggccagcagatgtccctttttgattttggagctttcagccagccgcagccggaggatgaaaaccggatttacctcttttctcatgcactgccccagcaggtgatcgacgaggcgctttgcatcggctccaaccatgaaaacagccgcctgatcgtctgcgcctatttcaaaaaggataagccggacaatgcccgtttcctcgcagaacactatggggaaaacggtgcgggcttctatctggatgggcgcaagtatgctctctggtacaatgccgaaggaatccgcatagccgggggcgagagcgcccagggttccagcgccacgctcatcccctgggaacaggcggcagcccgtatccgggagctgctggagctggggcggtatatgccccagagtgagcttgaccaggtggacgattatgagcgccagcaactggccgcacagctttggtatctgcggcaggattttgagcaagttaccgcagacgttggctttcttccaactgtaaacagtatttacaacacgcacaagggctttcctgatgaaagcgccgccatccaggaattgttaagacagccggaagcgttgcagaccctgcgggatgagttaaagagctttgtaaaggtatatgaactcgacagggagcttttgcgtttccagttccaccgccctcaaaagctgctggagcagcttacagatttacagcgggaaccgctgcactttaccgctgctgaaagctatgcccctcagcggcgtttgtatatctccatggatgagatcgacagccttctgcgcggaggaaaacgcagcgccgactaccggctggccgtgtattccttttatcgcaaccacccagaccgcagggagcgcgaggatttcttaaagaactatcatggggaatacagcgggtatcatggcggaaatgacaacgtgacctaccaatccggcaagggcgtccatttcagccacggcagtatcacagagccttacgccaaggtggagctgaaatggaacgcggtggaaaagcgcgtcagcgccatgatcagccagggccggttcttatccgaggaagaccgggccgccatgccgcagtatgaaaaacaccagcttgcccggaacatccgcactttctttgagaacgtaccccaggagcagccacacccctatccgtttggctttgactattgggacgcggtgaagctcatcgagccgcagcttgacgacccggcccgcgtggaggaaatctaccagatgatggcgccggtgtgggaagccaccccgcaggacgaccggatgtatgagcggcggaaaacaggctttgaaaacctttccgccttccgacagggcacgtttaccctctttgcagaacacaaggagcctgcggcccccgccatgcccccgtccaaagcctatgacctgggctatggctacctggggaacggcctgaccgtctggaaccggctggaggaagaacatggggactacaaaaccgtggcccatatcgcccccgaccgcaccgtgcagttttatgacgaggaaatgcctcaaacggtgcgggataagattcagcggattgccgacacctcggaaatgaccatctccgccacccaggacgcgccggtgttcgctgtgccgcccaaagtgcaggaaccacctaaaaaagaagaagccgcagacccctattccaagctggcagcccaggtgctgcattttattggcgagtttgacggctcccggctgggctatggggataccgacgcacaggcagtagaaaccattgcaggacagctccatgacccggcccagcgcggggaaatccgcaggcttttgcaatccttcctcgaccatgccgacccggaggaagaaatcacggcagacatcaccctttgtatagaagaaatggaggggctgcccctggcgctcaccccggaacaggcccaacgggaagaaattgcggggtatctggaagaagccgggtttgtggcttccgaagaattgatcgcagacggcattgccgaataccaagcccacagaggcgaaggaagcaaccgggaaattgcaggttttattgaacgcgagcttttggcagaagaaccggctgcggaaaccataccattcggccatgaagataaatatcgcttactcagccgtctgaaagccgactgcgattactttctgggcgaaggaggccgggcagaaaagcacctttggtctggatatgtaagaacgcatctcgataaaatgcgggaattatatgcttctctccctgaaaaaccggaatggcttgccccggaggatataggacgctatgaccgtttgatgtccccgccttatcaagtagtcgtatatcataacgaggagaaagggtttgtagacaagcagaggtatcaaacgcttgcagaagcggaacaggctgcacagaagtatgtggacggcgttatggagggggaaagcgactttgcctacgagggcgctgccgtctatgatattcatgaaaacagatggctgtgcgttttcaggaacttccccaatcaatatgcaatcgagcaagctgcacaggctctctcctcagaggaacaggcagaattacaacccctaaaagaaagattgcttccgaagttgcccaagcgcccccaccgtgagcgcgtgacctttgcccctttacacccggaaatccccagggaacagcgccatgattttcacatcaccgacgacgccctggggcatggcacacccagcgagaagtatgcggccaacacagccgccatccgtaccctaaagcagatcgaagccgaggaacggctggctgccccggaagaacaggaaatcctgtcccgctatgtaggctggggcggccttgccgactgctttgaagaaaccagcccccactaccaggagctgaaaagccttttagatgaggaggagtatgcggcggcaagggccagctccctcaccgccttctataccccgcccgttgtcatccggggaatctataaagccctctcccagatgggcttccagcagggcaacatcctggagccgtcctgcggcaccggcaactttttgggcctgctcccggcagagatggcggactgcaaagcctacggcgtggagctggacagtatcagcggcagaatcgcccagcagctttaccagaacgccagcatttccgtgaacggctttgaaaaggtgcaaatgccggacagcttctttgacgcggcggtgggcaacgtcccctttggggatttcaaggtggtagataagcggtacgacaagcaccgctggctcatccacgactatttctttggcaaggcgctggacaaggtgcggcccggaggggtgattgcttttattaccagcaagggcaccatggacaaggaaaaccctgccgtccgcaaatatctggcccagcgcgccgacctcatcggggccatccgcctgccggacaacacctttaagcaaaacgcaggaacggaagtcaccagcgacatcctctttctgcaaaagcgcggccatatcaccgatctggagccggactgggtgcatttagatacggatgaaaacggaatccgcatgaaccgctattttgtgcagcacccggagatgattctgggcgacatggtgatggaatccggccggttcggcccggacagcgcctgcaaagcccgcgagggtgaagatttatccgcgcagcttgccagcgccatccagtttttgcaggcggagatcaagccctatgagctggaggaactggacgaagaggaagaccgctccatccccgccgacccgaatgtaaagaacttcagttataccgttgcggatggacaggtgtactaccgggaaaacagccgtatgcacccggtggaggtatccgtgacagcggaaaaccgaatccggggcatgatcgaactacgggaatgtgtgcgccggctcatcgactaccagaccgagggctacccggacgcagacattaaggccgagcaggaaaagctcaatgccctctacgacggctttaccgccaaatacggcctcatcagcagccggggcaataagctggccttttcggaggactccagctattgccttttgtgttctttggaggtgctggacgaggaaggcagcctaaaaagaaaagcggatatgttcaccaaacgcaccatccggccccatgtggctgtgaccagcgtggacaccgccagcgaggccctggccgtctcgattgcggaaaaagcctgcgtagacatggagtatatggcccggctgtccggcaaatccccggaggagctggaggccgagctttccggggtgatcttccgcaacatcgaaggcccggaaaccccggacgggctgcggggagcttccctcagcctacaagccttttcccccgtgacggcggacgaatacctttcggggaatgtacgccgcaagctgcggatggcaaaagcctttctggaggcggccccggagggccagaaggaagctgtccgcaaacaggtggaggctttggaggccgtccagccccaagacctgggcgctggggaaatcggcgtgcgcattggcgcgaactgggtgcccgtcgatgtgtaccagcagttcatgtgggagctgctcactccctatgggcaggccagaagccgcataaaaatcctgcgttccgaagccaccggccaatggacgattaccgagaaaaactttgaccgggccaatgtcaaggctaacaccacctacggcaccaagcgcatgagcgcctacctcatcctggagcagaccctgaaccagaaggatgtgcgggtgttcgactatatcgaagatgaaaacggaaataaaaaggccgtcctcaacaagaaggaaaccgccatcgcccaggacaggcaggagctgatcaagcagaagttttccgagtgggtttggaaagacatcgaccgcagggaacggctgtgcgccatctacaacgaaacattcaattccatccggccccgtgagtacgatggacggcacatccgttttgacgggatgaacccggaaaggacgctgcggccccatcagatcaatgcggtggcccgcattttgtacggcgggaacaccctgctggcccacgaggtgggcgcgggcaaaacctttgagatggtggccgccgctatggagatgaagcggctggggctatgcaccaagtcgctggtggtggtgccaaaccacatcaccgagcagtgggcggcgtcctggctggagctttaccccagcgccaatatcctggtggctacaaagaaggattttgaaacccagaaccgcaggaagttttgcagccgcattgccaccggggactacgacgccatcatcatcggccacagccagtttgagaaaatccccatgagcgccgagcgccagcgggccattttggagcatcagattgaagaaatcctggaagggattgaacaggccaagtctcagaaagcggaacgctacaccgtcaagcagatggagcgcacccggaaatccttagaggcaaagctggaaaaactcaacgaccagagccgcaaggacgatgtggtgacgtttgagcagttgggggttgaccgcctgtttgtggatgagagccactattttaagaacctgtttttaatgacgaaaatgcgcaacgtgggcgggatcgcccagaccgaagcgcagaaaagctccgacctctttatgaaatgccgctacctggatgagatcaccggagggcgcggcacaatttttgccacaggaacccccatctcaaacagtatggtggagctttacaccatccagcgatatttgcagtatgagctattacaggaaatgggcctcatccacttcgacgactgggcggggagctttggagaaaccgtcaccgccatcgagctgtccccggagggcaccggctaccggtctaagacccggtttgccaagttttataacctgccggagctgatggctgctttcaaacaggtggccgacatccagacagcggatatgctccaccttcccgtgccaaaggccaatttccacaatgaggtcatcaagccgtccgagcttcagcagaagatggtgaaagggctggcggaacgggcggagaaaatccgtgccggaggcgttgacccccatgtggacaatatgctgcgcattaccaacgatgggcgcaagctggcgctggatatgcgcctgatcaacccgctggctgccgacgacccaaacggcaaggtggctgtctgctcccggaacgtctacaaaatctgggaacagaccaaagaacagcgttctacccagcttgtgttctgcgacctgtccacgcccaccaaggacggctctttcaacgtatatgacgatctgaaaaagaagctcatggagcagggtatcccggaggatgagattgcctttatccatgacgcggattccgaggcgaagaagaagctgctgtttggccgggtgaacgagggccaggtgcgggtgctgatcggaagcacccagaagatgggggccggaaccaacgtacagaaaaaactcatcgccctgcacgacctggactgcccctggcggccttccgaccttcagcagcggctgggccgcattgtgcgccagggcaacgataacgaggaggtggaaatcttccgctatgtaaccgagggcacctttgacgcttacctttaccagctcgtggagaacaagcagaaattcatcgcccagatcatgaccagcaaaacccctgtccgggtggcagacgatgtggatgaaacagccctcagctattccgagatcaaggcgctggctaccggcaacccgctcatcattgaaaagtgcagcctggaaacggaggtgggcaagctcaacatgctcaaggccagctatctcaaccagcggtattccctggaggagctggtgctgcgcgagtacccggcagacatcgcccggctcacggaacggattgcgggttatgagaaagacgtggcgcttgcagccgcccacccgaaagccaaagagggcttctgcggcatggtgatcgagggcaagccgtatgaagaaaaagaggacgcaggcaaggctatcctggacgtttgcagcaaaatgaccggttccgacgcggttttgctgggggaataccggggattttccatggtgctggcatacgacggcatgagcaacgagtaccgcataacactgaaaggcaccctctcccatacggtggcgctgggcgcggatgtgttcggcaatatcacccgtctggacaacgccctggaaaaccttgcggggagcttgcaggcagagcaaaacgatctggaggaaaccaaaggccagcttgaaaacgcacgcgccgagctggacacgccctttgcccgcgaggatgaactgacggagaaaagcaggaggctcaaagaactgaacatcctgctaaacatggatgagaaagacaagacgctcatcgacagcgttcccgacgagggcgaggaagccccgcagcggaaggcgatgggattggagcgttaatcgcacatttgccaccgcgctgcggaggcgttatagttgtgtaaaaaaggaaggggtgaagatggatggaggccagctatcacacgctcatggagcgtatttcagaacagtttgctgaaatcgacggcgatatggttatggaactgcgcagcaacagcacaaagtattccggcattaaaaatcagatccggcagttggatcaggagtatccggctatccaacggctgctggaggatgaaggggaaatccacctctccgcagatgaacacaaagccctgctggactatttacagctttatctcgaagccacaaatatggaacgggaacacatctacttccggggccatacggacggctttgcctatctgaacaagatcggcgctttcaaaacagaatagcccatgaaaacggtgtggagcgatccgcaccgttttttacatagagaaaaagtacagccccctttacatagccggttgccccatgcgggcagctaatttatggctatgggaagggggctgtattttttatgcctttttacagccaggaggagatcgaaaaagcgcgggaggtggacttgttcacctatctgcaagcctgcgaaccccaggagcttgtccatgtttccggcaacgtctactgcaccagggaacacgacagcctgcgcatttccaatggtaaatggtgctggttctcccgtgggatcggcggtttcagcgcgctggactacctcatcaaagtcaagggctgctcctttatggaggcgatggaatccatcgtgggcagggccgccatcccgccgccgtcccttgcgcccatccccagggaagaaacgctgaagcacctgcttttgccgccgcccgccccagacaaccgggccgtgctccagtatcttgcaggccgtgggatttccatggaggtgctggacttctgcgtccagaccgggcggatttacgaaagccggaacaagggtcatggaaatgtggtctttgtaggctttgacaaaaccggcaaggcgcggttcggttgtctgcgcgggattggcgagggccggttccacggggatttaagcggcagcgacaagcactattcctttgccctgcccgcttacggggagaacccggctgtccatctatgcgagtgcgccattgatgtcatgtcctacgccagcctttgcaggctgaatggaatcgactggaaacagcacaacctgctgtccctggctggaatctaccagccgaagaaaaggattgcggagagcaagctgcccgtggccctcacccgttttttagaggatcacccccatgtaaaaaccgtctatctccatttggacaacgacggccccggcaggatggccgccgaagccatccagacggtgctacccagggaatacgaggtcagggactgcccgccgcccaggggaaaagatgtgaacgactacctgtgccaacggctggggcttcccatccggggcgtgaaagaaaaggagcgagaacgatgaacgagtatgacattgcaattcgagagacgctggaaatgacggtcacagtggaggcagcgagccgcgaggaggcccgccggatggtggccgagcgatggaaaaacggcgaatatatcctggacgcggacagcttcaaggacgtggagttctaccccagggcccgcagccgcgaccggggcgagcgatgaattgttttttcggacgtttgggattcccctgcggggaatggaacgtgtatgtaccagcaagcatcgcctttgtgataccacaaaggcagcttgttagggggaacgccccctaatacccctttatcaaaacggaggttttctatggaaggattgttttttgccatcggttttctgctgggcggcgtgttcggcgtgctggtcatgtgtctgcttcaaatcaaccgcttaggcaggaaggaggattcggaggaatgagaaaacgcaacgtacacgtccagttttggctggacaaaaaagaggcggaagccttcaacaaaaaggtgaagcgcagcgggctttcccgcgaggtgtacctgcgccacctgataaacggcctggttccccaggacgcgccgcccccggcatactttgattttatgcgggagctgcacggcattggaaacaacttaaaccagatcgcccagaaagcccatgtgctgggcgtcatagacgagcgccgctacgaggaagaaatacggaagtttgaccagctcatccgggacatcaccagggcgatgattttgccaaagcctatggagtaaagcaatggctaccacatctatctggcgggtgaacggctggctgggcaaggttctcatctatatcgaaaacccggataaaaccgaaaacccagatttctttgaaaaacaggatatggacggcaaggaggcccagggcctctccgatgtgatcgagtacgccatccagcagaagaaaacgggaaagattgcggtggacgatgaggatgtgcccgtcatgcagcggtttgtgtccggggtgaattgcagccccatcaccgcccgcgatgagatgattgccgtcaaaaagcggttcggcaaggaggaaggcaccgtagcctaccatggctaccagagctttgcccccggcgaggccaccccggaaatggcccacgagatcgggctgaagctggcaaaggcattgtggggtgagaaataccaggtgctggttgccacccatttagacaaggcccaccacctgcacaaccattttgtggtgaacacggtttcattcctcgacgggatcaaataccaccgcacggaaaaggattacttcgacatgcagagggaatccgaccggctgtgccgggagtatgggctttctgtcattgaaaacccccagcggggaaaatccaaacactacggggaatggcgggccgagcaggagggccgccccacctatctctccctcatcaaagccgatgtagacgctgccatccgccagtccatgacggagaggcagtttttttaccgcctgcggcagatgggctacgacatcaaggtaggtaaagacatcacgctgcgagcgcccggcagggacagcggtagaaagctcatgcgcaacctgggcgaagcgtattccctggagaacatccgcaaacggattctggcccagcgccgcccccagcgggaacacaggccggaaccgctgcggtgcaggcttttgggggacttgaagcaggccaagaaggtcacgggctttcgcgccctctacttccactactgctacctgctgggggtattcccccaaaagcagaaccggcagcggggccatgtgccccacgagctgcgggaggatttaatccgggcgcaggagttgacggacgaggcaaggctgctttcccgccagcgcattgacaccctggagcagcttaacgcctaccaatcggatgtggaagcccggcttgccggcctgaccgaacagcggaaaaacctgtaccggaagctgcgcaccaaggaggcgcttgccgaccctgcccggcaggaacaaatccgggcggaggtttccgccctttctgcgcagatcaaagccctgcgccgggaggggaagctgtgtgaggacatcgcggcgcgctccttctccctcaaagagaagatacgggctgcccgcgaggaacagcaggctggaaaagcagagaaaacccgcgaggaacaaggccggaggaaacggctggaaaggagatgatcggttatgaatcacgcaggcgacgcggcggagcaggtggtgcgcatgagccttgagggtgcggaggttgcccttaaaatcaccggcgttgccgctaaaaatcttgccgcagccctttataccattttgaaagaccagaagaaaacaaaaggcaaggcccgcattgaggccatgctgcgggaaaagcggcccttaaaggtttacaccctcaaaaaagaggattgcccggagtttgccaggcaggccaagggctacggcattttgtacgcccccatcccggtgaggaagggggacgataccatcgacatcctggtgttcgaggacgacgcggcgagggccaaccggatcgtggataagttcaacctcacggtggtggatacggcgtccatcaaggaggacatcgaaaaatcccgcgaggagcgcggcggcgagccgcaggccccggaaaaagccgccccggaaaagagcgaggacgacaggctcttagacgaactgatggaaaaaccggcccaaaaagagaaaagccagccggaaaacccttctgcggagaaaagcgtcccttttaccccagcggaggaaaaatcccatccgtccgcgcctatctcagagaacagcagcaagtccgcaaggggtacttctgatgagccgcagaagccgtctgtccgtcaggagcttcgtgacatccaggcccagcggaagaaagaggcggaggctgcaaagagggaggaaccggctgcaccccaaaagaaggcggcccagaaaaccacgcggcaccagccgcccaagcccaagaagaaaccaaaatcgaaagagaggtaatcggttatgaataactttgacgatctgtttgaacagcagccccagccggaggccaccgagaagccggagccgcaaaaggagaagccgaaaaaacagtggtggcagatccgcgaggaaaagcagcgcaaggaagcctacgccaccctggacagggtgttcggcgcgttttccgaagggcacggcgacatgaaggcatatctggacacccagagccgcttccccttccactccgcccgcaacgccatcctcatcggggagcaatgccccaacgctaaacgtgtgggcggctacaaggagtgggcttcccagggcgttgagattctggaagaggaaaagcgcctgcccatcatcattttagagccgggcaaggcataccgccgcgaggacggcagcgtgggccagaacttctatgccaaggaggtctttgacatttcccagaccacggcgcgggacgaggcccagccccaggtgagctacgacgaccgcctgctcttaaaggccctcatcagcaattcccccgtgcccatccgcgcggtggaggagctgcccggccaggggcgcggggccatgttcgacccggaacagaacgccatcctggtgaaaaagggcatggacgcgccggacatcttccgctgcgtctctctggagcttgccaacgcccagcttgcccgcagcaacgcagagtattcccgcgaaaccgaaggctacaaagcctatgccgtcagctatatgctctgccagaggtacggcgtggaagcgggaggctacaacatctcccggctggacggcgtgcttcaggggcaagaccccaaggaggaaatcccggcagccctcaccgatatgcgcgacacgtttaaggagatcaacgggcgcatggcaagggccatgggcctctcacgcgcgggcaggcagaaagaacaggaacggtaaaggaggctgaatgaatggaacgacaggaaaaggttgtcctcacgctggacagatacgagcatggcattatgatccgcgccctcaacgaactgcgaaacgatatgctggaggaacagcgcgaccctggcccggtggaggatgttctgctgaaaaccattgacgccccagcccaaaaagacaagaaagcgaagcgccgggatgaagccagataacaaggcgggcggcccctggctctatgccctggggctggtcccggtgatctggttcgccctgctgattgcgcctgccatttccgggggactttcggagatcgtaaacgccctgcctgcggcaatgaacaatccattcaaaatcgtgtggtgtgaggacagtgtaaaaactgtcctcatttttattgccgcctatgggctgggcattggcatttatctttcttcccggcgcaattatagacgaggcgaagaacacggttccgccaaatggggcgatccgcgggccgtaaataagaaataccgggacaaggacccgttcaaaaaccgcatttttacccaacacgtccgcatggggctggatggccggaagcaccgccgcaacctcaacactttggtggtgggcggcagcggcgcgggcaagagccggttctatggtaaagtgaacatctgccaatgcaatacgtcactttttgttttggactgtaagggggagctgcttcgtgactgcggcggcctgctggaacggatgggctatgagatcaaggtgatagaccttctgaatatggagaaaagccactgctacaatccatttgcttatctgaaatccgacaacgatgtgcagaagatggtgacgaacctgttcaaagccactaccccgaaagggagccagtccaacgaccctttctgggacacggcggccagtatgctcctcatggcgctggtgttttacctgtggtacgaagcgccggaggacgagaagaatttccccatgattatggagatgctccgagccggggaggtgcgggaggatgatgattcctaccaatcccccctggacgagctgtttgaccggctggaaatgcgttccccggaccacatcgccgtgaagtattacaaggattaccgttccggctctgcaaaaacgctgaaatccattcaaatcactttggcgtcccgcctggaaaaattcaatctttcctcggtggcggccctcaccgccacggatgagctggacctttccagcctgggcgagaaaaaagtggcactctttgccctcatcccggacaacgacgccagcttcaatttcttggtaagtttgctgtatgccagcactttccaggaacttttttattctgctgaccggatacacggcgggagccttcccgtaccggtgcattttttgatggatgagttcgccaacgtgagtttgccggatgatttcgacaagctgctggctaccatgcgctcccggaatatcagcgtttccatcatcattcagaacattgcccagctcaaggcgctgtttgaaaagcaatgggaatccatcatcggcaactgcgatgaatttctgtacctgggcggcaatgaaacgtccacccacaagctgatctccgagaactacctgggaaaaagcaccctctggctggacacctacggcaagagcaccgggcattccggcagctactccaccaacaaccagatcacgggccgggagctgatgacacccgatgaggtccgtatgctggacaacaacctggccctgctttttatccgtggcgaagcgccgctgatggatgaaaagtatgaccttttgaaacatcccaacatcaagtacaccaccgatggcggcgcacccgtctattcccatggcggcactgaaaacgccgtggcggatatggtcattggccgcctcacccccggcgaccttgccaatatccaggaaccggaaaccctttacgaacttctgtccgatgaggacatggagaatatctttcaattcaaggaggaaaagcaaaatgaagctgtttcataaggaaagcaagcagaagaaagaaacccgcagcctgcccatgggcaaaaagagccggagcgcctttgctgtttatgcggccctggtgctcatgctgtgctgctgcaccactacggcctttgctgccagcgacccgttgactgttatcaacaacctcagtgatttcatcttcggcctgattcgcgccattggtatgattctgctgggcttcggcgtcgtgcagatcggcctttctctgaaaagccatgaccccagccagcgagccaatggttttctcaccctggccggcggcgttgtgattacgtttgcgaaggagattttgaccctgattaccggctgattctaataacggcagtgtggggggcaggcccgtggtggcctgccccttaccgttgccggaaaggaggttgttgaatgtccgataactgggttgttcaaaatttgcaaaatgccctcgacacctggaacaagtacctgtccgagatttggcagctcattacgcaatcaccggaacagtttaagggcggctccatctggggcgtcattgtcaatatccacgacgcggtgcgggccattggccttgcgcttttggtgctgttctttgttgtgggcgttatgcgcacctgcggcagctttgccgaggtaaagaaaccggagcacgccttaaagctgttcatccggtttgccattgccaagggcgtcgtgacctatgggctggagctgatgatggccctctttaatatcgtccagggccttgtctccaccattatgaacgcggcgggctttggagctgcgcagcagacggttcttccccaggagatcgtcacggcggtggaaagctgcggattttttgagagtatccctttgtgggcggtgacgctcatcggcgggctgttcatcacggttctcagcttcattatgattatgaccgtctacgggcggttttttaagctctattgtgcgcccggaagggctgcggcataagccaaagcagctcgcgggcaatttgggattctgccagtagcgcggcagtaggagaaggtattccgaagggaggtgcaaattaccctatcaccaaccgatttatccggcggggaaacccaatggggagtgtagcatatcggcaacgtcgtaagttgggaaactatcgaaccactactgaacggcaaggtgaaacgttgtgaatgaggaataaagctggattgcttgaagggcagtccaaggcggcatacttgagccggcggcgcaggatagttgtattcgccgcatgccgtggcaaccggtgacaggtacacgccgattgcgaaatacccacggcagccaaccgcagtaagcggataacggacgaaaacccattccgacatcacaacacgctgtcccaaactgcctaaccggggattgcctaacccggaacgcccttataggctatggctttcagagcctgaaaattcggtatggcaacggagccgccgtagtagtctgagcaagggaaagccttgcacatggcgaagggcggcaggatatcaaccaaactatcaatggaaaggtgcgtgaggcactatgagaagtccaaagaacgttttggaaagtctgacatcaaaagcagcaaacaaagattaccactatcaaaggctctatcgaaacttgtacaatcctgcattttttctgctggcgtatgagcgtatccaagcaaaacccggcaacatgacagccggaagcgatgggaaaacaatcgatggcatgagtatgaagcgaattgaagccctcattcaaaaactgaaggagttcagttatcagccaaaacctgccagaagaacgtatatcccaaaagcaaacggcaaaacacgccctcttggtatcccgtcttttgacgacaagctggtgcaagaggtggtgcgcatgatactggaaagcatttatgaacccacctttcacgttacttcccatggattccgcccaaagcggagctgtcatacagccctgcaacatatcaagcggaattacacgggggtcaaatggtttgttgagggtgatatcaaaggatgttttgacaacgttgaccatcatgtgctggtacagatactgcgcaggcgcattgcggatgagcattttatcggcctgatttggaaattcctgaaagcaggatatatggaaaattgggtgtactacaacacctattccggcaccccgcaagggtcgctgattagcccaattctggcgaatatctacctcaatgaactggatgtgttcatggcggagtattccaaatcctttaaccgcggtacaaaacggaaaatcaacccggcctacaaaaagccgttggatgtccggcgcggaaaacaggaatggctgaaacgcaatgaagcaaaaatcagtgaggaaaaacgccgggaggtcatggcgcagatacaggaacttaatagccaactgcgctctatcccttacagcgaccccatggatacggaatacagacgggttgtttatgtccgttacgctgatgatttcctgattggtgtaattgggagtaaagaggatgcgaggcaggtcaaatccgatgtgggagcgttcatcaaggaacatcttcacttggagatgtccccggaaaaaacgctcattacccacggaagtgactttgcccacttcctcggatatctgattacagtcagccgggaacaaaacagtacccggacaaaaacgggttttacacgccgaacctatgtaggaaaagtcaagctgtatgtgcccaaagagaaatggctgaaccgccttctctcctatggcgcgctgaaaatcagctatgacaaaacccatgggaacaaagaggtatgggaaccggtacggcgtccggggttgatacgcctggatgatattgagattctgaaccagtacaatgcagaagtgcggggcatgtacaactattttcggctggcaaacaatgcaacggtgttgaacgccttcctctatgtgatgaagttcagcatgtacaagaccttcgccggaaaatatcggacgagcatgcggaaaattattcgcaaatactgccgcaacggggattttaccgtatcgtattcaacgaaaaacgggacaaaatccgtggtgttttacaatcagggtatgcgccataacgacaaagtcgttgtaacggaaaacccggacattattggcagggctaacgagaaccgccgctatacccggctgacagaccggttgcaaggccatatctgcgagttctgcggagccgaaacagagaatattgaaatccatcatgtccgaaaactgaaagatttaagtggtaaggcagaatgggaacgccaaatgattgcgcgtaaacgcaagacaatggcgctgtgccactcctgccatgtaaagctgcacaatggaaagttagactgatatctggaaagccggatacatcgagaggtgtacgtccggtttggaggggagcgtttggaaacctaccgcagcaatgcggcaaggcgccgggcgcttaccctactatacacggccatcgcgccggtgcctctgtccacctttggcggggaacccagccagaacgtgggcaagagcttcatcaaaagctatgccgccgtgtgcctggagggggcaatcatcgtgctggcctgcattatcttctccctgttcgcggcttcaccccctgcggttgaccccaacgcggcggcagttacccaggtgtggagctatgtgggcgagctgctgttcaatatgctggtgcttgtaggcgcggtgaagatggccgaccgcgtggtgcgcgagatgatgggcctgtaaaggaggaaaagtcaatggacgatacaagaaacgaggtttgccgcaaggtgctggaaacgcctcttgaggacatccgggaggatgtgttcttccgcgccgacaactttcagaatgagccgtggtacggcgagtttcagatctaccgcaatctgggcgtttgccagcccaagccggaacacgtcctggaggtgcagaaggcgctgaaagtcatgggctatcccacccacgctgccgagcggaacgggaaaacctatcttctccccggcgaaaaacagcccgaaagcacaaagacgttgagggaggaatggaaaatggcgcggctggaggaacagaaagaagctgcctctcggctgttttagaaatcttcccggcaaaagggccgggagcgttaagaaacggagggatatgttttgaacatgagcaaagaaaagctgatgaggcttgccgggcgcgccctaaagcgcaccgaaccctatcaatggaaccgggggctggacgtgccggatgaggaaaactacaaaatcgactatctgctggtcaagggaagcaaggcttccccggaggacgtgatagcctatgcgtcctttgaggacgatatggtgcggttccatccgctgcgggaaaacgaccagccttttgcgcattacggcgagtgcttcacttacgattccgacctgtttgagcctttggagcaaggatattccctggcttgtatgtcgccggaggcccatgcctgcgcctggtatgaaatcgaagatttacagggcgggatcgaacaccaggcaggtatgcagagctatttgcactactgcaagcagcacggcgttaccagggtgcaactggcccgtctggcggactatgacggcatggatgtgatgaagctctatgaccggcaggctgtcagaggggcgcagggcaagcagaaaaaagagtttgagcgataacgggaggtggcattttggaagtcaagatcaaccgcgaaatccgcaactacaccgaatccatgtttttcggtttgagtatgcggcaattcattttttccattctggcctgcggcgtggccgtgggcctttactttctcctgcgcccctactttggcgtggaaaccctttcctgggtttgcattttgggcgcgtccccctttgccatgctggggtttatcacctaccacggcatgacggcggaacaattcatctgggcgtggctgcgctcggaaatgctggagccaaaggagataaagtttgaggacggcaactattactatgctgctttgaaagatgtgatcgaggggcggcagaccgggcggcccgtcagaaagcagcccaaagagccgaaacagttttacaagcggaaggaggcaacccatgattaaaacgttgaaaaccatgtccaagcaggacaaggagcgatataccgtaccccggaaggtgcaggatgtgatccccgtccgccgtatctggcaggacggcatttttttgaccggaaacaagttttccaaaacctatcagttcagcgacatcaattatctggtggcaagccgcgaggataaagagagtatgttcctcatctactcggagcttctcaactccctggattctggagcggtgacgaaaatcaccatcaacaaccggaggacgaataaggcaaactttgaaaactccatcctcatgcctatgcaggaggacttccgggacgagtaccgcagggaatacaatcaaatgctgctcgataaggccaccggggccaatggaatcacccaggagaaatatatcaccatctctgtggtgaagaaagatattgaggaggcccgcgcctacttttcccgcgtgggggccgacctcatttctcactttgccgccctgggttccaagtgcgtggagctggacgcttccgaaaggctgcgtatcctgcacgatttctaccgccagggcgaggaggcagagttctcctttgatttggcggctatggcaaagcgcggccacgatttcaaggactatatctgccccgacagcatggagaagaacagcgactatgtgaagctgggtgacaagttttgccgggtgttgttcctcaaggattttgccagctatatcaaggacaacatggtgacggagcttacggatttcaaccgcaatctgatgttctccattgacgtggttccggtgcctacggatgaggctgtgcgggaggtagaaaaccgcttattgggcgtggaaacgaacatcaccaactggcaaagacgccaaaatgccaataacaacttttccgccgtggtgccctatgacatggagcttcagcgcaaagagagcaaggagttcctggacgatctcaccacccgtgaccagcgcatgatgtttgcggtgattaccctggcgatcaccgccgacaccaaggagcagcttgacagtgacaccgaggcggtgctttccgtggcaagaaagcatatgtgccagcttgcggttctcaagttccagcagcttgacgggctgaacacggccctgcccattggggtgcgcaaaatcaacgccttccgtaccctcaccaccgagagtttggcggtgttcatcccctttaaggtgcaggagatccaggacaagggcggcatttactttggggagaacgctatttcccacaacctcatcatgtgcaacaaggcgaacctgttaaaccagtcggctttttacctgggcgttcccggcgcgggaaaatcttttgcggtgaaagagctgatcgccttccttatgctccatcccaattacgccaatgatgaaatcctcatttgtgacccggagggcgagtttggcgcactggtgaaagccctgggccgcgaaaaggctacggtggcccacctggtggcaggcggaaaagacaagctcaattccatgtatatggtggagggttacggcgagcagaatcccattgtggagaagtcgcagtttgttatgtccctcatcgagcagatcgacaagcgcggcgtggggccgcagcataaatccatcatcgaccgctgcaccgcccttgtttacccggaggcggaaaaagagggccgggccgccactctctgcgacctgcggaacaagctgctggagcagccggaggaaaaggcaaaggagatcgccctttccctggagctttacaccaccggctccctggacatctttggccgcgacagcacggtggatttgaataagccctatgtggtgttcgacatccacggcctgggcgagcagctaaagccagccggttccctcgtcatcaccgacaccatcttgaaccgcgtgaccctcaactggaaacggggcaagcgcacccatgtttttactgatgagttccatgtgatgtttgaaaacgagcagagcggcattttctttaacagcgcatggaggcagttcagaaagcgcggggcctaccctaccgccatcactcagaacgtggagtacctgctggattccgtgcaggccagcaccatgctcagtaactcggaatttatcgtcatgttcaaccaggcggcttccgaccgggaaaagctctccaagctcctcaatatctcgaaggagcagatgagctatgtcaccaacgcggacgcgggctgcggcctcatccgctacggcagcgccctggtgcccttcgtcaaccgcttcccgcgggacacaaagctgtatgccctgatgaccaccaagcccggtgagggcgtgttcggcggcgaggaggttttggtatgagcaggctcaatatccggtttacgtccgcagaacaccgggatttctttttgcggatgatgagtgaggcacggaaaaacgactgctatcaccagtctttcttttatgtcatggggattgccccggaaacacgggccaacatccgccagatgtttgatttcaagcgggactgtatcaaaccggagggtatgcacggaggctggcagaccagcggcaccgtccgggtgtgccgtttggccttcaacctctggaacggctataccgagccggaacacagcaacgcctattccccggaggatctgttctgctgtgaatttgccccctatttcatggagggtatgaaaatccgttatccggaatactgccgtgagctgccccctgccagaaagcaggcggaaccggcgcgataatggccttgataggaggaaaataaaatggctgaattgacctatacgctgggggaacatccccagatcatcgagcttctctccgtgctggagaaaaacaaccttcaaaagcaaaaggaagaagtgcaggccctggtggggtatatcgacggcatggaggataagctggcccagatgatggaggaaatgaaagaaatccgcctggaggttggcaagctccatgacaagggaatccaggccaaatgcgtccagcttgcaacggcggcggagggcaaaatccagcaggtaaaagcgatggtttccaccgccaaggcaaacctcatttcctctgccgggcgcatggtgcagacctttcaggaaaaggggcgcgctgccctgcgccatgcggtgcaggctttgcgtatccccgccgttctctcacgcatggaacacggcttttctcatgccggcaaggcgatggagcagtgcgccggaaagctggatgtgttccgggaggagctgcaccaggcgggaagccacatgaaaagcgccgggcgcgcccttgcaggcaaagaagtacagcaggcccaggagctggaggccgacaagggcgtgcttgccaggctgcggggcctgtttctgtcctgcggcaagaccttttccgggatggagcgcggcgcggcccgtctggctgaaaaagcaggcggtgagaaatcatccgtaaaatcggagctgcgggaactgaaagcggccccggacgcaccgcaccggcaggcagccagcaaagagcaggtgcggtaaggagggtaaagaaaatgagtgataaagtgaaaaccagatggatgattgcaggggcggccttttgtgccgcccttttccttttctccggggccatgctggcccgtgaatatctcgaccaaaagcagagcgccgaagcctttgacgaggtggctgggttggtcaaggaagatgtggagctgcccactttgacggtggaaggcagcccggcccaggagccggaggcactcacagcttttgaaaaatacgcggacgtgtacgcccagaacagcgatctggtgggctgggtttccatccccggcacccggattgattaccctgtcatgcagaccaaggacagcccggatttttacctcaagcacgcctttgacaaatcgtacagcagctacggcgtgccctatctggccgaaaactgcgacattggcatttccgacaacctggtgctgtacggccaccacatgaacaacggctcgatgttttccgacctgtgcaggtatgaaagcgaggatttctaccgggaacacaagaccatccattttgacacgctggacagctttggcgagtatgaggtgatcgccgcctttaagacggtggcctactccggggaggggttcaagtattaccactttgtccaggctgaaaacgccgaggcttttgaggcgtatattgccgagtgcaaggcgctggccctttatgatacgggcgtgactgcggaatatggcgacaagctcatcaccctctccacctgtgaatattcccgcacaaacggcaggatggttgtggtggcaaagcagagcagcgcaccagcacaggaggctggtatggatgaaggatgaaaagcacatcgtttccctttccggtgggaaagattccaccgccatgctgctgcggcttttggaagaaaactatccggttgatctgattttgtattgcgatacagggttggagtttccagagatgtacgaccatttgcggcggttggaagaatatattggcctacccattgtgaagctgcgggctgcccatgattttgaatactatttttaccgctaccatccaaagcggaaaaatcccgcgttggagcagtacgacggcatgagctggccgggaccgaaaaaccgttggtgtacggccatgctcaaaacccggatcattcaagcatatctgaaagagctgaaacagcattttcatgtatgggaatatatcggaattgcagccgatgaagaaaaacgaatcaaggataagcagtacccgcttgtggagtgggcaatgacagaaaaagactgtcttgcctactgttacaagcgggggtttgattggggcggcctgtatgatattttcagccatgtttcctgctggtgctgccccttgcaaagcctgtccgagctacggaaactgtatgagcatttcccgcacctatggcggcagcttgaacaatgggatagcagcacatggaggcagttccgggcggattactctgtccgtgcgcttgccatccgctttgaatttgaaaaagcctggcaggcaaacggcgggaagctgcgcggcaaggcgttctttgcagccttaaagcaaagattggcccaggagggattggaggtgaaaaggattgccggatataaagacaaggagtgttgcagaaaagacgatcaaggcgattgataaatctgcggttgcttcagagcggatgaaggaagcatatatccgcaccaaggacaaggccgagcatggcctgtacgcagaggaaggctcccccggcgagtatgcgtccgaccgtgtttcttccgggggtgagaatacggcccgtgaagctgtccaccaatttgacaagcagggccgcaaaggggttaagaccaccaaagagaacatttccaaggtcaaggagaacatccagaagcgcaaggccgcagccgaacagccgaaaaaacaagcggagaggcaggcggcaaggcagaccagacaggccgcagaccgtatttcggagccggtgaaagccatccggcaggagcgcggggctgtcaagactctggttcggggccagaaaagcattaaaaccgtggacaggagccgtaagaccatcaagcaggcgtcctctaccgccaaagggacagtgaaaaccgccagcaaatccattaaaacagcggaaaagacagccaaagccagtatcaagactacccagcaagtagcaaaaacggctcaaaaaacagcccaggccacggcaagggccgccagagccgccgcccatgctgcccgcgctgcggcaaaagcggctgtgactgcggcaaaggtggcggtcaaggccaccatcgcagcagtgaaagccatcatagcagcaacgaaggcgctgattgctgccatcgctgcgggcggctgggttgcggtgctggtgattattgtgatctgcctcattggcatgattatcggctcctgctttgggattttcttctccggggaggactccggcaccgggcagaccatgcagaccgctgtgcaggagatcaacgccgagtacgaggaaaagctggaggaaatcaaaacttcccacacctacgatgtgttggagatgtccggcagccgggcggtttggaaagaggtgcttgcggtttatgcggtgaaaaccaccaccgacccggacgctgcccaggaagtcgccaccatggatgactccaaaaagcagctcttaaaggatattttctggcagatgaatgagatctcatccagcacctctaccaagacggaaaccatcattgaaacatccgatgacgggcatgggaatatcgtggaaacagaagtcaccgtcacccgcacctatctgtatatcacggtcagccacaagacggcggaggaaatggccaatcagttcagttttcacgaagatcaacgggaacagatggcagagcttctggccgatgagaacagttccctctggagccaggtgctttatggcattaccggaggcgacggcgagatcgtcaccgtggcgctctcccaggtggggaatacgggcggtgcgccctattggagctggtacggctttgacagccgtgtggaatggtgcgcctgctttgtgagctggtgtgccaatgagtgcggctatatcgacgctggtgttattccgaagtttgcggcctgtgcgtcccagggtgtaccctggtttaaggagcgcgggctgtggcaggacaacagctacgagccgcgccccggtgacatcatctttttcgattgggatgatggaggccaggacggctcatccgaccatgtagggattgtggagaaggtggagaatggccgcgtctacaccgtggagggcaactccggtgattccgtgcgccagaacagctaccccgtgggatactatgagatttatgggtacggcacccctgcttattaacagcctcaaaaaagaagaagcccagccgcctgcgcggctgggtacatagaaatcaggcgaaataacaaaataagagtaggctccacttgacagtaaaacaaaaatatgctattctaacttttgtttgataatccgattatcttaaataaaatgtttatctaagaaaggaggaaatattttgagttattgctccgacttgacaaaagagcggattatggaatgtgcgaaagcagaattccttaaaaaaggctttcaggcagcgcaacttaaagatattgttaccgctgcaaaggttacaacaggtgcagtatatcgtcatttcaaggataaagaagcgctatttttggctttgattgaagatgtctaccattatacattagattttatggataatgcagagccttacgataaagttggaattagagaagccattgagagggattctgttgaagcgtcatatatgcaggccatgacatacattaactatatgtacgatcatttagaggaatttcagctcttgttgaaatgcagcaaaggctctcgcgtcgaaaattttatagaagaaattacaaaccaatatgcgaagcagaattccgaatttgtaaaagcggcatatgaagcgggatatacaaaatacctgccaagcgatatagaaatacatattttgacacatggctatattactgcactatgcgagtgtattttgcacgatgttccttatgaaaaagcggaggattacgtaaaaaacatcataaaattccagcattatggatggtatggtgtattaggacttccgttcaaataagtggctttggccatttattttttaccaaatggttagtttttgctaacttatttaaggaggattctttcatggagaagaaaaagaaatccggagcaattcatcaactgctggattatgccggaaataataaaaagcaactatatctttcaacctttcttgcaacgctgggagaattgtttgggatggctccctttattgcagtgtcattattagttgcagaattatttaacaaaacagcgaccattcaaaatgtatgtatcttgtttgcggttgctttgggtggacagatattaaagctatggcttacataccagtcctctttcatgtcgcataaggcgacatataaaatattgaaaaatatccgtagtatgattgcagataagatgcttcgggtgcccatgggcgttatgctggatacaccgaccggcaatttcaaaaatttgatggcggatacggtttcaaagttagaggattcgatggctcatttcatgcctgagataacctctaatatagtggctcccctgtgctgtatactactggtatttattcttgactggcgcatgggattagcggcattgataacaattcctctcggacttttgggatacattggaatgatgaaagactatgtgaacaaaagtactacttacatgaaatcgcaaaacgcgatgaacagtacgctggttgagtatgtaaacgggatagaggttattaaggcttttaatcaaggaagcgcctcttatagtaaatttacaggtgcaatcaacttctttcacgacagcactctggcctggtggaagcaaagttggctttggtcagccgtgattcaagctgtaatgcctacaacattgctgggaacgctgccgattggagcatggctttatatgactggaacattacctctgtcagattttatcacttgcattatccttcccattggatttattgctccgcttatgcgagttgggaagtattctgaacaatttaatatggtgaaagcttgcctcgaccaaatacgagagtttattgagaaaccggaattgagccgtccagaaaaaaatgctgtactggatgaaacagcctatcgctttgaaaatgtttcttttgcttataatgaaacagaagttctgaaaaatgtgtcctttgaaatcaaaccctgcacggtttcagcgattgtcggcccttctggttccggcaaatcaacgattgcaaaactcatggctggtttttgggatgctacaaagggagaggtcattttcggtggaaaaaatatcaaagagattccttttgcccagttgatgggtgaggtcagttatgtggctcaggacaattttttgtttgatgaaagtatccgtgaaaacattcgtctcggaaagccagatgcgacagacgatgaggtggtagctgctgcgaaagctgcctgctgtcatgactttatcgtaaatctggaaaacggatatgatacaaatgccggagacgctggagaaaaactttctggcggagagcgtcagagaattactattgcaagagcgattcttaaaaatgcaagagtgattattcttgatgaagctacagcctatgctgacccagagaatgaatatctcattcaaagtgctatcagcaagcttgtaaaaggaaaaacgcttattgtagtggctcatcgtcttgcaacgatccagaatgcagatcaaatcctcgtggtggaaaatggaaagattgtcggctgcggcagacagaaagagcttctgtcaaaatgcccgctttatcaaaggttatggagagattatgtgagttcagcagatcaagtggaaggaggattttaatatgttttcaattataaaaaggattttacggttatccggaaaatatcgttcccgtgtaattgtcgggttgatcttcaatgctctaaaatcctgctgcgctgcctttgtattttttgcggtgctattggtaatgttgaatatcgaacacttgacaggaactgtcattttacaggcatttggaattattgtacttagtgttttaggccgttttttatttcagtatctaagcgatgtgtttatgagtgcgtctggatatgagatttttcgggaaaagcgtcttgagattggaaatcagctaaaacgggcaccgatggggtattttacagaaaacaatctcggcaccgtacaaacggtattgacaacaacaatttccgatctggaaggaaattgtatgcttgcattgacttttttggtggggggctttgttcaggcacttgccatgacgttaatgttgggtatattttgctggcagattggccttttagccttaacgggaattttagcaggaattcttgtgttgggccagataaaaaaacgagccggagcacatacagaagatatgcaaaatgcccaggaattgctggtggggagcgcgttagaatatataaaaggtatttctgttctgcgcatatttgggaaaggcaaagaagggaaaggaaaggtggatcaagcctttgaaaacaagtgtcgcagcgatatagcggttacagtctctactgctggaattatgaagatatatgaagccgtatttaagattacaagctgtctattatttttgttttcagccctactctatttatggggagttattaccttaccctattgccttttgtttatcatctgtgcatttttaatgtttatggaactggaactgatgaatgatggagcttttttgagtaaaatgcttgctacgcagttagatcggctggatcttatctcagatataccagttttagatgttggcggaaaggacattgctctgaaatcatatgagattgaactaaaagatgttacttttgcttatgacagccgttccattttggatggaattaacttaaaaattccccaaaactctacctgtgctatcgttgggccgtcaggttctggaaaaacaactttgtgtaatatcattgcaaggttttgggatgtaaagtccggcagtgttaaaattggagggcatgacgtaagagaatttacctgcgacagtcttttgtcatatgtaagcatggtatttcaaaaagtgtacctgttcaatgatacgattgaaaacaacatcaaatttggcaaacctaatgcgtctcatgcagaagtagtggcggcagccaaaagagcttgttgccatgattttattgaggcactccctcaaggatacgaaacgatgataggagaagcaggttcaaccctgtccggaggtgaaaaacagagaatctcaatagcaagggcaatattgaaagacgcacccatcattattttggatgaagcgacatccagcgtagacccggaaaatgagaaagcccttttggacgcaatttttgaactaaccaaaaacaaaacattgatttccattgctcacaggctatccaccgttcggacagcagatcaaattgttgtcattgaccaggggcatattgttcagcacggaactcatgaggaattggcaaaaaaagaaggggtttatcgtacttttctggaatgccgggaaaaatccatcagttggaagttatgaggtgtgccgccatgaaaaaacaaattccaattatatcctttgagcatacctcttttcaatatgaaggacagatacaggaaaatctaagggatgtaaaccttactataaaatcgggagaatttcttgttattaccgggcaaagtggatgtggaaagaccacgttaaccaggtgtatcaataatttgattccacgcttttttgaaggtgtattatccggtgaagttattgtgtcagggcgatccattaaggaatcagacgctggtgaggctggaaaggagattgcctcaatctttcaagacccacgcagtcagttttttactactaacagctccagcgaggttgcgttcgcctgtgaaaattatggaatccctcatgaagaaatcgtcaaacgtgttgacagagcctttcaatcattggatatggaaaatctaaaagacagagatatttttactctgtccagtggagaaaggcaaaaaatcgcatttcttgcagcgactacgcttaatcctcaaatttatgtactggacgaaccatcggctaatttagacattcatgcaattttacagatgaggaaaatcctttctgccttgaaagccgcaggacacacaatcattgtctccgaacacaggctattctatctatacgggcttgcagatcgatttttaattatgaaagagggacgaatctgcgaagaattaacaggtgaggagatggcaaagctatctgcttctcaaatgcgcagcaggaggcttcgtccgttaaatctcaatacgatacaaatagaaaagatagagccgattgggcattcagaagtatttctccaaattaaaaacatgagtttttcacataaggctatgccggagcttcttcacagcatttcaatagaagctcataagggagaaacgattgctctggttggagaaaacggctgcggaaaaacaacatttggaaaaatcctgtccggcttgattcgttgtcgacaaggggggttctttattgatggaaagaatgtgaagcagcgaaaattgtccgattatgtgtactttgttatgcaggaagcagatcaccagctttatacagacagtgtgacagaggagttgaggttaggaaacaaaaagattccgggcatagatgaaaaagtgtctcgaattttgaaaatgcttcatttggaaaatttcaaagactgtcatccgtatgctctgtcaggtggtcaaaagcagaggttgacaataggggccgcaatgctttcagaaaaaccaatcatcgttttggatgagcctacaagtggattagattggaacaatatgtatgccgttgccaatgctgttaactttctgcgcaagtctgggaaagtggtttttattattacacatgatctggagtttatcagtctgaccgcctcgcgcactttgcttttgaaggaagggattatcaaagatgatttacaaatgacagggaaaagtacattcaaaattgtaaaggatttcatgatgaaaggtggtgaataaatgagaacacatcatggcttatattacgattcgcgtataaaactacttttgattttgttgacgtcggcgctggcatttgctttaggtggtggtctgacaggactattgctttttggtgttgtttgcctattttccttcctgagtgggctttggaaaacaagtattaaatttttaacggcttatatagccttacttatgctggcacaaatccttccaatccatttatcttctgtgataactttcttcttattaaggattttaaccattgcactcgctttgaacatcttatttcagactacggaaatagcggaattgatagcctcgcttcaagtgagccatatcccccaggccattgtgattccaatagctattattttgcggtttctcccatctctaaaacaggatgcgatttatataaagcagggaatgaaaacgaggggtgtgggattatctttctggcgagtgttaagtcatccagcgcagacatacgaaggctttttaattcctatacttatgcgacttttgatgacagcaactgaattatctgcatcggcagaaacgcgagggatcagctatccctgtaaaaaaactcactatatattagttgatttccgcttgagagacggccttttattgataggtatgcttgctctttttgcggttgtcatatggacatcgttccagccaatatcattattttaaggaggatttattccatgcaaaatgaaaacaaaaaaggctttcaagtaagagacttgatcgtcacagctcttttatctgtatgtgcgcttgtcatttatattctttgtgcgtttttgtccttttctccctatactatgttagtagtaagcccattgtgggcattactggcagctattacatacttccttgtggcagctaagacgaaaaaaccgtgggcattattcattttttgtgcagtaacagggatttatggtttttatccacctatgataatttgctgtattattgccgggattatttctgcgctgattgcctggaaaacaggttgtacgaatggaaagacacttacaatcagttatattatttacatggttttagcagcattcagtggaacatatattcctttcctgtttttctcaaaacaaacgcttgaacagtacgcaggaatgtttggcgaaagctatttggggattttgcagacgttggtatcgcctataacggctattataatgcttattgttgttggcctttgcgcttttatcggtgcgattattgctaagaaattactcaaaaaacatttccagaaagctggcatggtgtaaataactttatttgttcagaaaaaaggaggtgtgctatatgcccttaacatcttctatggaggactatttggaggctgtgctggtgcttcagcagcaaaagggctatgcccgctgtgtagatgtagcggagtttttgaatgtaaaaaagccttccgtgagccgagcggtcaaggaactgtctaaaaagaaatgcctactaaaaaaggacgatggcacactctccctcacagagcaaggctggcagatcgcccagcaaatctatgaaaagcaccagttttttaccagacagcttattgaggccggtgttccccatgatattgcagcacaggacgcttgcaggctggaacacgttattagtgaaacaagttaaaagaagctgcctggacaaatgcccaggaggtgataccatcggagaaataatcattatgaagctgaacgaggacgaaaaaaagatttttgaagatttcctttcatttttgcagcttcatccagagctgaaaaagtgggagcttacctcggaaccggtgctatctctctccgatcttgagattgatcccagccaaaggctggtgcgctgtaatcagaaagaagtggccttaacaacaaaagaatataatctcctttgtctgctggcagttaataatgggcgggtattaagctattcccaaatctatgaaaaggtgtggggcgaagctctaactgtcaatgaacgaggcaccgtaggctaccatgtccgaaacctacgcagaaaactctattccgccgatccgcaccatccctttatcatcgagagtattcgtgaaatcgggtatcgctttcaaacaacttcataatatccacaaagcgcagtcttgatagaggctgcgcttttcctttccataaagcgaggtcattcgggacggtttttcaaatctcatatcttgtcgcttgtgtttgacaaatcacacacgggacgtgtctaaacttgcgatgaaactatgcaaatcctctttgaagcctcgctgtttcctcttttttatacattatactacccctatcaacatttcaatttggggaaaggtggtggtgcttgtcagcttatccccataaggggatagcatggagccagaaagagaaaagccgggcggcttcccgcccacaaccgaacaaaaaccatatttcgtacataccgcagtccttacggggattgcggtatttttttgttcgacagacttttttcttttctccgggtcttacccatcatcaggcaaaaaccaacagccgagcgcacgcgccttttggtgtgtgcgcttttactttgtcggtaaatgcggttttctggtatttcccggtgggacaagccttccatgttgcagagggccgccgtccgtctggacttcttctcgaaattcagacgaaacggaggtacacagcgtggacgctggcaaaaaaagaatatgggttcgcggccaacttatcgaggtcacggatgaagtgtatgccgcctatatgaagggcgaccggaaaatgcgttactttgagaaagatttgaagtgtgaacgtcttatttatggcagcaacggtgaaatcaaacaggttattcccagccgggaagattccctggacaggctcatggaagaaaacgcccgtcagtttgcagctaatgcagaaagcgtggaggatgtggtgttccgaaaacttacgttggacaagctacataccgcgcttttgcaactccctaaagaggaacgggcgttgatctatgccctgttctttgacgggaaaacggaaagcgaagtggcaaagcacctgggcgtttcccggcaggccatacagaagcggaaaaacaggatactcaaaaaattaaaaaaattttttgagtaaacagggttgtcaaacctctcactcagcggcaaatagagtgagaggttcttttttggcctctccaggaaccttgaaaaccgaatacccaatcatcaagcacattcccgctgctttggcgaaagccaaagcccaggcggcggctgcgcggtgatctgccggaagaaaacaacgagactccaccgaaaaagagaagtaggtctttggtttgtacttcctggcagggagcgagaaacagcaggctgccagtaccggatggctcccggtacggccacgaccagcagcggggacaatgatactcccgtccagcctaacgtccgagcgttgaagcggctcttgccgtgatccgtcgcaggcaatgggggcggttgcgtgagaaccacgcgaggggtgagattccccgtggagctggcaagccgccagccgtttgatgacttcccgcagcaaaccggggtgtcgaggacaaattggtttgctttgaaatatgggccgtacagcaggacaggccaatgaaaacaggagaattgttttatctctccccggccttcattctgttttgctgcacggcctctacataggcggcctttgccgcctaatttttaaaagggaggtcaaataccatgaacaaaacatacttgcgcggcgatatgtactatgccgatctgggccggggtatcggttctgaacaggaaggctatcgccctgttgtcatcattcaaaacaacacggggaataaatacagccccaccgtcattgtagctgctatctccagcaaggtggacgcaaaggccaagctccccacccactacctgttaaaagcagaaagcggcctggagctgccctctcttgttcttttagagcagcttcgcaccattgataaaaagcggctggagacgtacatcggcaggctggaggaaaaacacatccgcaggatcgaccatgccctggccgtcagtgtggggctgatcgaggaggttcccgaaaacttaatcatgtgcctttgcccggcctgtgccaataacttttatggcacaggctcttattatttgaggagagtaaaccccgcgcagcagaaacgggacatctgcacctattgcagccagcgccccggctttgactatgaagttgtcaaaagagcagagagaaggtgagtattgaatatggaaaaactgattacccgtaaagaggcggcaaaaatattaggaatcagtttgaccactctggatgaagccagaaatagcggtttgatttcctatattcagtatgtgcctaatggctgcgtctattttacccataccagccttcaggagtatatcgcaaaaagtacgcacagagcgaagccaatagagaaaagagcaacatatcgcaatgtgcgaagataaaaatcgcacctttgatgaaataggcgcgttctgataaaacaagagtacggcgctgaaaattatttttggaggtggtggaatggctttaagaaaaaagcgaatccccagatatggtacagttcaagtgaacggtcataagtattatagaaccgatgttgaggacgcagagggtaagcgtgtaatcctttacggcaaaactcgtgaagaactatacgataaggaaatggcggcattggagaaggttgacaacatcacattccgtcaaaaatcccctactgtcgcagagtattgtgaaaagtggttgcttatgcagtctgtccatattcgtaatacgacattgacagattacacatccaaggtacggcgacatattattaaggagctgggccaaaagaggatggcagaagtaacattggacgacatccaggttgcgcttgttccggtttcaaagaaatccgtatctgtgtataagtcggttatcatcctgtataagtccatttttcgcgcagcacaggaaagtcatgtcattgatacgaacccaacaatatatctcaatgccaaaggcggcgggattcctcaagaggacaaacaggcgttgacagatgaacaagcagaacggcttttagacgctattcagggattaccgccctatgtgtttgttatgattggtttgtatgccggtttgaggcgtgaagaaattcttgcgctgcaatgggattcggtatatttagacacagaggctccctatttgacggttcggagagcgtggcatacagagcataaccggccaattattctcacagagttaaagacaaaagctgcggaaaggaatatcccccttccagatcgtttggcggattgtttgagagaggcaaagaaaaaatcgacatcagaatatgtgatcgccaatcgggatggggagccgctttcctatacgcagtttaagagattgtggcagtatatcgttaccagaacagcaaagcctcgagtatattataggtatgagaacggaaaacgtgtgaagcataccgtcaatccggttctcggagaaaaagcagcacataacgggaaagtgatttacagcctcgattttgatgttacaccgcaccaactacgtcacacttatatcaccaatttgattcattcatcagtagaccctaaaacagttcaatatttggcagggcatgagagcagcaagattaccatggacatatatgcaaaagttaaatataacaagccggatgaactggcaggagttttaacggacgcatttgctcaatgggacgaagccgaatatggaacagcacagtaaaaaatgaaaacattgcgaaggcgagggggaaccctcgccttttgctattacataaatcgcacctttgaaagagccatggattttcagtataaagatagtatcagcgctgaactacataataataggaaaggaactgaaagcatggctaagaaaaaagtgagtattcctcagtatggaactgttatgaggagaggaatccagtattataggacgcggattacagacgcagacggtaagagagtagacttatacgctgaaacgagcgaggagctttatgaaaaagagttggaagctcgacgccaagtagaggaggcagttttccgcagaaaacatccgacagttgctgagtattgtgagaagtggctgctcatgcagtcagccaaggtatcttcaagcactttgaaaggctatacccagaatatgaacaactatattgtgaaacctctgggagatatgtatttgtcagaagtgacagcagacgatattcggttggcactcataccattatcccaaaaatcagcagggttatacagcacggtcaatatgcttttgaagtgtgtgttttattcggcggagcgtaaccaactccttgactataacccttgtgtgggaatatcggcaaagggaggtaaaccggggaaaaagaaaaatgctttgacagatgaacaggtgaagctgcttctggaaaccgtccgagagctgccaccgtatgtatttattatgatcggtctttattctggcctgcggcgggaagaaattcttgcgttgcagtgggattgcgtgtttctggatgtacctacgccatatatttctgtaaggagagcatggcgcacggaacacaacaggccggtgatttcgacaacattgaaaacgaaggcggcacagagggacattcctattccaaagtgtctggcagattgtctgaggcaagtaaaagcaacatccatatccgaatatgtgattgcagacagcaaagggcaaccgctggccgattcgcagtttaagaggctatggcagtatgtagttgttcggtctacaaaggagcgcacctattacaaatatgtaaatgggcaaagcattaaatgcaaggttacgccgattcctggcggtcatcagaagaacaatcctaaacttgtgtatagtctggattttgacgttacaccacatcagctacggcatacctacattaccaatcttttgtatgctggcgttgatccaaagacagttcagtatcttgcggggcatgaaaacagcaagacaactatggacatctatgcgcaggtgaagtataataagcccgaacaccttttgagcgttgtaaatgccgcattttccgcgcccgtgggtgcttagagtgcccccatttttatgattaaagggtggggcaattttagtggaataccctgaaaaaccttgaaaaatcaagggaaatcgccattcagaggatttgagtacggtctcaaagccgctcgtcgcgctccgcagttctcgaagagataatcagcccgatatatattttcctcgaaacacagaacccccgaaagccactggttttcgggggttttctatgcccaaagctcgggttttatttatccggctaggccggagtgcccatttgcgtatgactgcgtaatcggaatgaagcgctggttcttaagccgccgcaatggacgccgatgtccagaagattgatgtacatctgcccgatctgctggccgatctgataaagctgcgcgaactcattttcgaccagcgcatagcgcgcggaaaaattcttcgcgtaggtggcccggccctccgaatacccgtgatacgtcgtgatatagcggatcgcgggcagctcgagagcgcggatatgggtgtcctgatatatatggccgggatagccctcgtgcgcgatgatgtcatccagcgttacctgactcagtcccgcaccgttttcaaggcgttcccgctcgatttcggcgtagccgagaaaggtctcctcggcggtttccggaatatgaaagcagctgtccagatcgcttctgcggttgaatttaaattcattgagcaggatgggatgctgggcctaaaagccggtgaagctgccgcggcagctgttgtcgagataatagtaatcgtccgtcagccgggtgagttcgaggtagtcctcgaccacgtcgtaggtcaggcgctgcgcatcggtcaggctgctgcgctgaaacgcatgccggctgtccagcacctcccccgcccagcgcgaggcttcctcgcaatcctccttgcttgagagggaaagggcgtagtctccacggagccgtgggtctgcgggtcgctgaacagcatgcagctgtccggggaaataaactgcgcggggagcttttcggcgaaccggtcggatagctcctgctcggaggagaaaagcgcgcagcccgctgcgccgatgcagagcagcacggcgcagagcagggcgaggccctgtttcataaatcgtgcgcgtcgtttcattcggtctcttctccattgtgttttttacagcgtatccgttctgcggcgggcgtctatgcgaaaggattgtccgacagccggtgtgcgcccggcgcggactgacctttagtccagcaggaaagcacaagcggccccgcgccttcagtttctggaaaagtgccgggctttgggaagcatgcggcgcaagcggagccgcacgtctcccgcgccgtttggctttttgcacggctacgcgttttcgctgtcgcggaaatcggcggcacacagcgttatccaccgcagaagcggctcgattctttccgcgctgtccgccctgtaggcaaagaaataatcgatggaggcctcggcgtctgtgatcgggatcagcacgcggccgccgccgtcgtcgcggtaattgcgcacgatgcgcgtcgtggtcgtgggcacaccggtgcggacgatctggtgaaacaggaaatagtccgtgtagcgggtcatctttattctttgggcgagcgcctgatacaaggcgtgatgctttgcggagaatacgccgtcggcttggaaccgcaccagctcgcgcaccggaagcatgcgcagggagacctgcgaaagcccggcggccgggtcgtcccgcatgacggaaagaaactgctggtcccggatgaacggcgcgcagcagatgccctccttttcgacgttttgagccgtgacgagcagatcgaaccgaccgctctccagaagtgcggcctccggctcctgcgggggatatatctcggtctcaagcacagcgtcgggaaagagcatcgaaaattttggggtgcagtaccatctggggccggggtcgcagaagccgacacggaagaccttggcccgctgcgaaaacgcgagcaggtcggccttcatctgctcggcctgctcgagcaggcgcttggcgtggcgcagggcaagcgcccccgcctcgtttaaaacgatccggttttttgtgcggtcaaaaagctgcacgtgcagctctgcttcaagttttttcagcatggcgctgagcgcgggctgcgaggtatgcagccgtgcggcggcctggctgacgctctcgcattcggcgatttcccggaactgggcaagctggtagagctccacagccgcacctccttctcagtataatttgtatttataataacataaacagaaagtcttgtacatagggagctttttgcggtaagatataaacagaaaatataagggaggaaccgtgaaatgaaaacaagaaggatcggggcgctggaggtttcggagatcggtatgggctgcatggggttttcgcacggctacggcaaggtgccggaggaggcgtacagtctagaggcgatccgtaaggcgtacgcggcgggctgcaccttttttgatacggcggaatcgtatgggcgcgaggtattttaccccggccacaacgagcagcttgtcggaaaggccgtcgccgattttagaaaggagatcgtcctcgccacaaagctgcacgtgcgggcggaggaaatggagggcggggagacactgtacggcgccgtgcgccgccatctcgagcgctcgatgcagaatctgcagaccgattacatcgacctgtactacctgcaccgcatcaacagcagcgtttccttcgaggcggtcgcacaggtgatggggcggctgattcaggaggggctgatccgcggctggggcatgtcgcaggtatcggcggaaacgctcgcaaaggcgcacgcggtcacgcctgtcacggcggtgcagaacctgtacaacatgcttgagcgcgactgtgaggcggatattttcccgttctgcctcgagcacggcattggcgtcgtaccgttttccccggtagcgagcggcttcctttccggaaagatcaccgcagacacgcagtttgaaaagatagacgacgtgcgcaactgggtgccgcagctctctaaggagaatataaaagcgaatcagccggtgctgaaggtcatctcgtcgtttgcggcgcagaagaacgcgacgaacgcccagatctctctggcatggatgctgcacaagtatccgaacgtcgtgccgattcccggctcaaagaatcaggggcgcattctggaaaacctcggcgcggcggaggtcgcgctgacggacggcgagttggcggcgctggaagcggcgctcggccggtgcgagatccacggccaccgcggacatgtggagagcgagcagaacagcttcagcaaaaattgggcggagaaatgatgcggttgcggaagcgccggcacgaagctgtaaaagatgccggcacgggcgagcgcagaaggacatgacaaaaaatcacaggctgtgcgtgtcaaaaccacctattttctttacaaacttctggtaatatggtaaacttttcatataaaccgagctgtatcgaatagaaagcgagatggacagaatggatgtaaggaaaaaagacggcatttgccgtgtcgcgcaggaaaacgggaggacgctggcgtggtcggaaacctccggcgtcgggcttatcgaacaggacggcctgtatttcaaggatctcgagcgctgcggagcgcttctgccgtacgaggactggcggctttccgacgaggtgcgcgcagaggatctcgcaaagcgcctgacgctcgaggagatcgcgggcctcatgctgtattcgccgcatcaggctgtgccgccgatgccgttcgggccgttccgcggcacatacggcgggaaagcctacgaggaatcgggcgagccgccgcacgcgctctccgaccagcagaagaaattcatggaggaggagcacatccgccatattttgatgatcacggtgcagaacgccgagacggccgcgaagtggagcaacgcgctgcaggcgcgcgccgaggcgctgccgcacggcatcccggtgaacatctcctccgacccgcgcaacggcgcgcgcggcaacaccggcatggaatttaagaccggcggcagcgatgtgagcaagtggcccgagggcgtcggcttcgcggcctgcttcgacccggcggtcgtccggcagtttgccgaggacgcctcccgcgaataccgcgcgctcggcatcacgacggcgctcggcccgcagatcgacctgtgcaccgagccgcgctggatgcgctttgtcgacacgctcggcgaaaatctcgagatgacgaagaagctcgtcaaggcgtactgcgacggcatgcagacaacgcagggcagcgggaccggctgggggcgcgacagcgtcaacacaatggtcaagcactggccgggcggcggcaccggcgagggcggccgcgacgcgcactacgcgttcggcaaatacgcggtctacccgaccggcaacgccgccgagcacaggaagccgtttacggaggcggccttccagctcgacggcccgaccggcgcggctgcggccgtcatgccgtattacacggtttcgtgggggctagacacgaagaacggcaaaaacgtcggcaattcctacagcgaatacctcatcaaggacctgctgcgcgagaagtacggcttcaagggcgtcgtctgcacggactggggcatcacgcaggaccccgcgccggtcatcgacacgttcggcagccggtgcttcaacatggagggcaagacggaggccgagcgctgcctcaccgcaattttgaacggcgtcgatcagttcggcggcaattcggagatcgcgccgattgtggaggcgtataaaattggctgcgaaaaattcggcgagccctttatgcgcgcgcgcatggagctttccgccgcgcgcctgctgaaaaacatcttccagtgcggcctgttcgaggatccgtacctcgaccccgcgcagtccgcggaaatcgtcggctgcaaggcgttctgcgaccacggcttcgaggcgcagcacaagtccgtcgtgctgctgaagaaccgtgcgggctgcctgccgctgaaaaagggcctgaaaatttacacgccggtgcgccatatccgcgacgcaaagggcttcatgcgcaacgacatcccggcgcacgacgaggatcccgtcacggcggcgcttctcgcgccgtacggcgtgcgcgtcggaacgccggaggaggcggacgttgcggtcgtgttcgttgaaagcccggcctgcaacccgtattcggcggcggacgccgaaagcggcggcaacggctatctgccgatcacgctgcaataccgcccgtacacggcggataccgcgcgcgccgagagcatcgcgggcggcgatttccgcgagggtttcacaaaccgcagctaccgcggcaagacgaacatcgcctacaacgagtcggatctcgacaacatcctcgcctgccgcagggcgatgggtgacaagcccgtcgtcgtctgcgcgacgctcaacaacccgatggtcatgcgcgaatttgagcgcgacgcggacgcgatcgtcgtcgaattcggcgtttcgcgcgcggcggtgctcgacgtcgtgttcggcgattacgagccgacgggccgcctgccgatccagatcccgaaggatatggagacggtggaggcgcagagcgaggaccgcgcgctcgacatggagccgcacgtggacgaagccgggaacagctacgactacggcttcggcctgaattacggcggcgtgattaaaagctgaactgcgcgccgaaatttccgcccattgcggcgcgggcttttacagcgcggaaaaacggatgagagacgcttgcttgacataactcgacataagtcgtacaatgtacgcagtacagagtgaaaggaagcgattgcattggcaaaccgaagccggcgcacggcaggtgcgtcacgcgcgccgaaaaagaaaaaaaggccgaaccggtttcggattgcggtgatcacggctgggatcgtgctggcggcggccgccgcagtcatcgtcgtttacgcggcgaacgcttccaaatcgaaggacaacgcgtttttcggcgtcgcggacgggcagcccgagtttttctccacgatccggccggacggcggcgaagcgtccggtacatcggatacgggggatgatgcggcggcgagcgccgcgccggcctccgaatttgacggcgccctgttcgtgggcgacagcctgacggcgcagcttgcggactacgtgcaggagggggcgggcagctcgacgatcctgcacgacgcggttttcctgacgtcggacgattacgcgtggggcgacgttgtggacgagctggacggcggcgagggctcgctctatctcagcgcggaggagggcacttccgccgtgacgctcagcgaggctgtccagcagaccggcgcgcgcaagctgtatattcagcttggcaaggaggatctcatctataacgatgtttcgaccgtgatggatcgcgccaaaaccgtgctttccgcgctgaaaagcgcattcccgtctctggagatcacggtgcagtcggtcacgccgatgctggagtggatcgattatgagggcctgagcagcagtacgattgcggaatacaatgcggagatgaaggcgtactgcgcgtcgaacggcttcggctttgcagacgtggcggcgtttttcacggacggctatttgcccgaggaatactgtgccgacccgggccagctctgcatccacctgaacgacgcaggctgcgcgctttggacctcttacctgctgggagagattgagcccgagccgacgccttccccggagccgtctccggatgctgcggacggcggggacacgagcgcggacagcgtggcagcggcagaggcgacagctacgccgatgccggcagatggtgcgggcgacagcccggccggcacggagacgggcggcgcaggccgtgcggatgcggtggactgatataccgtaaattgtgtttttaaaagcaaaagacacaatatattcccaaaacaaaaatatttcaaaaaaattgaaaaaaaggcttgcaattttcggagcagtgtggtatcataactaagccgtcagatgaggcggcaacaaatagttggtgttgattacagcgagggtccacctgttcccattccgaacacagaagttaagctcgtttgtgccgacgatacttggctggaaacggcccgggacaataggttgatgccaacacaaaaagaaccgcatttgcggttcttttttatttttcgcaaaaccttgttatttattggtttccatgctataatcggagcaattatttccgagagggtgtgcgcacatggatattcggatggctgtgacggatttggacggcacgctgctgcggggcgataaatccctatccacctacacgctgcggatgatagagcgtgttcgggcgtacggcattctgtttgtggttgccacagcgcgcccgatacgcacggtaaagagtatttccgcgctgcggttcgacgctggaattttccacaacggcgccgtggtttatgacggtgcggcgtgcgtcggcaaagcggggatagaaaacccgcgcgagattgcgctgcgtatcctgcgggacaggccggactgcggcataggcatcgaggcggaagatgtactgtacgagaattttgatgcgggcagtatttggcccggtctttcgtatacgtatacgcgggatttttcagagctctcgggcaaaacggcggataagattttggtgcgggccggctctgcggcggagctggaatcgtttcgcgcgtatcttccggagaacctgtacatccagctttcggaaaatgcggtcggcatggtgatgaaccgggcggctacaaagctgaacggtatacggtgcttggcggcgcgccatggaatcgccatggaagaaatcgtcgcattcggagacgatttaaacgatgtggagatgctgcgcggctgcggctgcggcgttgcggttgtaaacgcgccgccgcaggtaaaggaagccgccaataccgtttgtgcagaaggcgatgcggacggtgtggcgcggtggctggaaaaaaactgcgttagggtaaaagcagggcgacttgccggcggtttggcggcgcgccgtgcagaatgagagaggtgctgaaatgcaggaaatgttaatcagtctggcggtggcgctgatcgccggcctgctcatgtcccgtctggcaaagctgctgcggctgcctgcggtcacggcgtatctgatcggcgggcttttgctcgggccgttctgcatcggcgcgctgcaaatcaagggcgtcggcttcaactccctcgagcaggtagagggcctgagcattgtcacgcagacggcgctcggctttattgcgtttgcaatcggcaacgaattccgcatcagccagctcaaaacgatggggcggcaggcgatcacggtcggcatcctgcaggccgtcatcacgacggcgctcgtcgatgtcgtgctcattgcggtgcacctgatcaatcccgcgctgatctcgctgcccgcggcgatcacgctcggcgcgattgccgcggcgactgcgccggcggccacgctgatggtcgtccgccagtataaggcgaacggcccgatgacaaagctgcttttgatggtcgtcgcgatcgacgatgcggtcggcctcgtgctgttttccgcgtcgttcggcgttgcgatggcgctcgagcacggcagcgtcagcgtggtcagcgtcgtgcttgagccggtcatcgagatcgtcctctcgctggtgctcggcgccgtcgcgggcgtgcttttgaactggctcgagacgtatttccattcgcgcagtaagcggctttcgctttcggtggcgttcgtgctcctgatggtcggcctttcgcaggtgcactttgaggtcggcggcgtctacgtcggcttctctctgctgctcgtctgcatgatgaccggcacggttttctgcaatgtctgcacggcttccgaggagctgatggagcggctcgaccggtggaccggtccgatcggcattttgtttttcgtgatttccggcgcggagctggatctgaatatcctgagcgacccgctggtgcttttgatcggcgtgatctacatcgtgttccgctccctcggcaagatcagcggctcgtattggagctgtgcgctgacgcattgcagcgagcggataaaaaagcatctgggcatcacgctgctgccgcaggccggcgttgcgctcggcatggcgctgaccgcaacctcgctcgccgacggcgccatcgtgcgcaacgtggtgcttttttccgtgctggtttacgagcttgtcggcccgacgctcacgaagcattcgctgctgaaggccggtgagatcaagcccgagggcagggtgagcgccagaacggaaaataagccgcagtcgcatttcacactgcacagctgatttaaaagacaaagcgcggagccgacaggttccgtgctttttcataaaattccttacgaaatcatttcagctttgtaagattgcttgacataacgctccgccctgcggtatagtatgcttaggagaacataccctcaaatccgtgacaagggggattcacgatgaaaaagacaggcaggcttaaaaggctgttttcggttgttctggcagttctgctgttcggcggcgtaccgtttgccgcagcggcagaggagatgcagacggtgcaggtatccgtgcagggcacgtatgcaccgggtgaggccgacgcggttctggagcgaatcaatgccatccgcgaggaagagcagggcgaaagctacgtgccgctggagtggtccggcgacctcgagcaaatcgcgcgcctccgcgcggcggaggcctcggtgtcgtttggcgacgtgcgcccgaatggaaaagcatggtcaacggcggttcaaggcggcgtgagcagcagtatggaaaacctcgcgcagaccacagagaatgcggaacaaaagcagagcgcgatgctggcggccgtcgaacagtggtatgcggaaaaggacgcttatacgcaagactcggagagtaaggatgcggttcgttacgctgcgttggtcgatccggcgtaccggtttatcggccttgctgcgtttcagaaggacgggcagaccggcgcggtaactgcggcggagttctccgcagaggagggcctgaaaaccgatgcagccgcggagagcaaggaaacggcggccaccgtagaggtgtcggctgaaagcctgcgtctttcgattgcgccgggggaatccgacggcgcggcgctcgaaaagggagaaacacgcgcgctttcgatctcggccgccgttgttttcggcaaggtcgagacgccctgcacactggtatcgccggtcgtatggaaatcgtcgaatgagggtgtcgcactggtcgacgaaaacggcacggtgacggcggtcgacggcggtaaagcggagatcacggcggaggttggcggaaaaacagtttctgtattcctgtcggtacaagcggccacaccgacagccacgccaacggcaacaccgacggctacgccaacggcaacaccgacggccacgccgacagcaacaccgacggccacgccaacggcaacaccgacggccacgccgacggcaacaccgacagccacgccaacggcaacaccgacagccacgccaacggctacaccgacagccacgccaacggctacaccaacggccacgccgacagccacgcctgtaaagacggaccctgcctacaccctgcgcatcgaccgggatggactgacgatcacggacgccatgaagaaggccggtctggacagtgaagaaaaggtgaaggccgcctttgaaaagcagtgggcggatcagaaaatcaacggcgtgcagtatctggacgtcaagctgcaggtcagcacggacggaaaggtgacttggacggcggccggcgcggatgtttacgcggacggcggcaagttcatcggcctgccgtatcccgagggtgccgacaaatcggatgattttgtcatttaccacatgtatgcggaggatatgctcggccacagggccggcgacatcgaggtctttgagggcgaaaagctctcaaagggtgaggatctgcttttgctcacggtgagcggcttttcgccgtttgcgatcgtgtggaaggatccgccgcctgcgacgccgacgcccgcgccgaccgcggccccgaaaacggagccgaccgcgacgcccgctccggcggtaacagcagacgcaacgcctgcgccgacggcggccccctcgccgtctccgaatccggatctaaaggttccgccgaccggtgacggcacgccgatcacggcgctgtatacggctgcctccgcttcagcggcaggtcttgtggttctgcgcccgcgcaggagaaaaaagcgttagtagaataaacagaggcgctgcccggcgataatcgttcgggcggcgcctttttctctgcatgttcgattgcacggcgcccggctgtgtgttacaatttcagtaacagccgcaggctgcggcgaagtaatcggcagaagcggcgcaagtgtgaagcgaaaaggcgcggcatcgcatggccgcaggccgtaagggggagaaagcataatgagggttttaatcgcagtggattcgttcaagggcagcctgtcgtcgcttgaggcgggcgaggcggtgcgcgccggcctgcttcgcgcggtgccgggcgcggtggccgaggtctgcccgctggcagacggcggcgagggcacggctgaagcgctgacggcgggccttagcggggaaatgatttccgtctcagtgaccggcccgctcggtgcgccggtcacctgccggtacggcatcgcgggcggtctcgccgtcgtggagatggcgggggcggcgggtctgccgcaggtaccgccggaggcgcgcgacccgatgaaaacgacgacgttcggtgtgggcgaggtgatccgcgatgcggtcgcccgcggctgccgccggtttgtggtcggccttggcggcagtgcgacgaacgacggcggcgccggcatgctgcaggcgctcggctttgacctgctcgacgaaagcggcgcgccgatcccgcgcggcgcggccggcctcgcgtatctgcacagtatcggtacggcgcacgcgctgcctgaattgcgggactgcacattccgcgcggcgtgcgatgtggagaacccgctgtgcggcccgctcgggtgcagcgccgtattcggcccgcagaagggcgccgatgcagaacgtatccgcagaatggacggctggctgcgggcctttgccgcgcgcacaaaggctgtattccccgagagcgacgcggatttcccgggctccggcgcggcgggcggcatgggcttcgctctgcgcaccttcctcggcgcatcgctcgtgccgggcattgaaatcgtgatgcaggagacggggctggaggaaaaaatccgcgcggcggacgttgtcgtgaccggtgagggccgtctcgacgcccagaccgcgatgggcaaggcgcccgccggcgtcgcgcgtctcgcgaagcggcacggtaagctggtgctggcctttgcgggcgggcttgcggacggcgcggaggcctgcaacgcggcgggcatcgacgcatttttcccggcggtgcgcggcgtgacgacgctcgaggcggcgatggagcccgcgacggcggcgaaaaatctcgccgcaagcgccgaacaggcattccgtctgctggcggcggcaacgtgccgctgcgaagtcgcggaatcgcgtgcataagcacgcttcgccggtgcgggaaagggacttttcggtcgcggcgggggcgcacggcgatgcaatgaaaagccgtttgcacttggcgggcgcggcgggcgcggcccgcggcgaggtcgcggaatcgcgtgcataagcacgcttcgccggtgcgggaaaggggcttttcggtcgcggcgggggagcacggcgatgcgatgaaaagccgtttgcacttggcgggcgcggcccgcggcgaggtcgcggagtcgcgtgcataagcacgcttcgcccgtgcgggaaaggggctttttggtcgcggcggggacgcacggcgatgcgatgaaaagccgtttgcactaggcaggcacggcggcagcgtgccgcggtaaggggatagggacggcaggtgcggtctgcggcgcaggagaagctgcgcttcatggcggatagaaaggcgggtgcaaaatgcacgatatttggaatccgtggcacgggtgcgtcaaatgcagtgagggctgcgcgcactgctacatgtattttctggacagccagcgcggcaaaaacggcgcggagatctaccgcacgaaaacgggctttcgctacccgctgagccgcgaccgcgcggggaattataaggtgaaaagcggcgagcagctccgcgtctgcatgacctccgactttttcctcgaggaggccgacccgtggcgccgggaggcgtgggagatcatcagccagcgccgggacgtcgtgttttatctgctgacgaagcggccggagcgcgtggaaaagtgcctgccggtcaactgggggcgcggctgggaaaacgtctttttcaacgtgacgtgcgaaaaccagcgccgcgcggacgagcgcatcccgattttgcacagcctgccgtttcggcacaagggcattatgaccgcgccgctgatcggcccggtcgatattgaaaaatatctggccgaagggcagatcgagcaggtgatctgcggcggcgagaattacgacggcgcgcgcccgtgcaattttgattgggtgcgcgcgctggccggccagtgccgcgcgcacgcggtgacgttcaatttcatcgagacgggtacgaacttcatcaaggacggccggcggtatttcatgccgaacaagcgcgtgcagagcgagatggcgtttaagtctggcatgtcgtttcgcgggcggccgatgcggttttatctggaggacgaattcggcgagcttccgcccgagcggctgtatacgccgtatttcggcccgcagtgcgggcgctgcggcagccgcctgacctgcaacggctgcgcccgctgcacgcggtgcatggtgctcgacccaaaggggtgaaaaaagtgccggcgcgattgccggcacttttatctggaatcggtattcctttttttaaagcccgcgcgggtacgattgacctgtgggattgtgttcggcgtataaacgaggatttcggaaaggtcacagttgagagcttcgcagattaagtccagatgctgtaaattgacacgctctgcaaattcattgtaaagctcgttgattgtgttggggcggatacctgtcatacgagcaagatcggcttgtgtcatcttcaattctccgagcttatttgacagcaaaatacgaatcattctatccacctcaaaagtgcgtataaacctattttccaatattttcttataaaaaatcgcaatttgttatcctatatcgaatatggataaattataacaggttgcgataaagccgggcgcattttggtagaatagacccgatagcggaagaaaattacgggaagggtaagaaagtgtgtaattggggttttgaattaagcgtgcggtttaatttatttagaaaaagagccgatggtattcggctctttttactttgtcgaaaaaagcacttttttgccatacattttatagtatagagatgttttttgaaaaaagtacattatacatcaaatcgggtgtatagaaataaatttgagaaacaaagagggaatgcaagatgactttcggacaaaatctgcggtattaccgcagagcgtgcgggtattcgcaggcgcggctggcggcgcttttgtatgtggacagaagcgccctgtcgcactatgaacgggatcgggtgcagccgagcatccggcgcacgctgcagatcgcgcgggtgctcggcgttgaaatggaagcgcttttcgacgagcgcccggaagccgcggcggccggtgtgaagcggggaaatggcagatgacgctgggcgacaagctgcggttttaccgcacggcggcgggatacgcccagagcgccgtggcgcgggagatcggccgctcgaggacgacatacacctattacgaaaccgggcggaatgaaccgagcgtgcggtcgctgtacatcatcgcgcggtttctgggggtgccgatggaatatctggcggacgacgattacacccccttcggcgcggaggaatttctcgagagccgcaatagtcggtgtaaaatgaaaaaagagccgtgaaagcggctctttaaagggtatcagacttatcacagggcggaccgctggcgcacggcctcgtaaaacatgaccgtggcggcgcaggctacattgaaagagctcgctgagccgcgcggattcatcggaattgtcacgagtgtatcactgcgttccttgtagatgcggcggagcccctcggtttcgttgccgatcatcagcatggtcggcttggtgaaatccacatcggaaatcgttttttcgtggtgcgccgtcgtgccaatgagctgaaagcccgggtagcgtgccttcagccggtcgattagggcgaaaaccgaagtattgtctgacatacgcaccgccggcacgcagaaaaatgagcccattgtggaggaaaccacgtccggatcgtataaatcaacgccgtgccccgtaaggatcaggccctccacgccgagggcatcgcatgagcgcaggattgtgcccagattgccgtggttcgaggggcggtcgaatagtgcaatcagcggattttcagacagcgggatgcgctcgaaatcgtcgtcgcgcattttaatgacagcgagcagctccgaggtatcctccttgctgctgagtgcggcaaggagctcgccgctcagcgcgtaattgacctgtgtgcgcacccgagccagcttatccttcgcccagtccgagagcttgcggttgccgtcgtagaggaacgagacgatctgccagccgttttcgacggcgttgttgatgttccgcacgccctcgacgaaaaattcgccgtatttgtaccgcttgttgcggttggttttgagtacctcgaatttttgaaaggttgcgctgcgcgtgtatacctgctctgttttcatgtgcttttcccattcctttgattcgtattctgcgccgcagtggtccctgccgcgaccaagcagttctttccagcaccggcgaagcgtgtttatacacgcgattccgcgacctcgccgcgggccgcgcccgccaagtgcgcgcggtttttatcgcgtcgccgtgcgcctccgccgcgatcaagcagttctttccagcaccggcgaagcgtgttcatacacgcgattccgcgatctcgccgcgggccgcgcccgccaagtacgcgcggtttttatcgcgttgctgcacgcctccgccgcgatcaagcagtttctttccagcaccggcgaagcgtgtttatacacgcgattccgcgacctcgccgcgggccgcgcccgccaagtgcgcgcggtttttatcgcgttgctgcacgcctccgccgcgaccaagcagttctttccagcaccagcgaagcgtgtttatacacgcgattccgcgatctcgccgcgggccgcgcccgccaagtacgcgcggtttttatcgcgtcgccgtgcgcctccgccgcgatcaagcagtttctttccagcaccggcgaagcgtgtttatacacgcgattccgcgacctcgccgcgggccgcgcccgctgttgccgccgcttcgcgcacgtattcggaaagcgtcttttcctgtacgccgactacgctgactgcgcagcggtttaccggcaccagaatcttgcgcgcgcggctttcggaaaccgccgccgccattttcggcgtgatctcgccgagcagggcgttcgccgcaatgatgccgatcgggccgacgattacgtctgcccaagcgctgttgacgatcaccgggttttcgccggttgccgccgcgtgtgcgcctgcgcgcagcatcgccgcggtcgccatgctgtttgtgccgaccgcgatcagctctgcgtccggtatgtttttgagaagctgctcggtcagggccgcgcccatcttgccgccctgcccgtcaatcaccagaattttcatttcccattcctccaaattttttgcgcggtatttttgcgcccgtcagggattttccacaacaccggaaaccggcagttcgccgtacatcagtgccgtgcagtcgatcgcgacgccgccgaccgtcacgggctcgccggccgcgtagacctcgagggtgtcgaccgggcggcccgccgcctcgtaaaacgcgcggaacgtcttggaaatcgcctccagagaggccgccgtggtcgaatcgttcaggtaggtctgaagcgcgccggaaaattgcaggcggaccgcgccgtccgattcgtcgagcgcctcgagcgcgacgtctgcgggaaacgcgccgtactccgccattgcttccacgagcgcggcggcatccgccgtttcacccgcaagcgtgtactgcgtcaggccgctgtcgttcggcacaaagacggggacgtcctgcgccgaaactgcggcagttgcgcccgtctcggcgggcgaggcggcgctctccgccgtgggcgccgtgccgccggtatccgcgggggcgggctttgcgccgcagccggtgagcagcagcatggccgcaagaagggccgccgcaccgccggcatgcctattgcttcgttttatcatctgtatcgtctcccttctgcgctgcctttttgcgccgaaaggcacgtaaaaggcggcgcacatccgatttgatgctgctcgtttgcagccacatggcgagctccccgccgatcagcaggatatacatacatatgaacagccacatcatcaaaatgacgattgcggcgagactgccgtagatcgttgcataattcgaaaagttttcgacaaaaatagaaaagaaggtggagaagagaacccagcccgccgccgcaaatgccgcgccccagaaggcgttccgccacgatacctgccgccgcggaatcgcgatgaacatcagccagaagaaaaggagcaaaatcacaaagcccatcagcggcttaaattcattgatgatccgcgggaatacaggcggcaggtatccgagcagccattcatagagcatgtcgccgaatacgagcaggccgatgctcacgagcaggatcaccgcgagcgccagcgtgtaaacgatcgcgagcgcgcgcatgaaaaagtaattgcgttttttcggcacgtcgaacaccgcgtacaggcccttgaccagcgcgagcatgcttgtggaggccgaccacacgcagatgatcgccgtcatcgagaggatgccctccggcgcgcggatctcgctgaacagcaggcgcagcagctcgtccaccggcgcgggcatcacgtttgcaaaggcgaacagcagcgtcgtatcctcgaagcggatcagctgcgacaaggtgagcaggaacatcagaaacggaatgaaggcgattagaatccagaacgagacctgcgccgcataggaatcgatcgcatccccgtccattttgttataaaaccagatgaaatgcttgcgcacgaggctcttcacggcacgccctcccttcgcttttcggcatggcaccagtatagcatagaaatatgaaatattccagcgaaaaagcacttgacaaaagaaaaagcataggttataattatgtacgctccataaagatttggagcctatatggcggcatagctcagttggctagagcattcggttcatacccgaagtgtcgatggttcaagtccatttgccgctaccatatggcccggtggtcaagcggctaagacaccgccctttcacggcggtaacacgagttcgattctcgtccgggtcaccagaaaacggatgggaagcgttcccgtccgttctgtttttccgggcaacagcgctcgcggcaaaccgcgggcgatcggcggatggaagcgcggcggagcgcctgcggcatgcaggaagctccgcgcgcttccgtttttattttacggggcattcgcctgcggcagagcaggcgcgcggcacgcattttagggaggcgtttttatgcacaagctggtcagcatcaatcttgttaccggagatccggtgcggctttcggctttctaccgcgacgtgctcggcgcggagctggaggaaaaccacggcggaccggaccgcattgagatctggttcggaccgaaaacggacaatacggcctgcatcgtcgcaaaccgggacgcgggttttgcgccgcgcacctacaacacctgtcagggctttgagctgcgcgtggcggatgtggaagcgctttacgcgcgtgtctgcgcggcgggcatacagcccgagaccgcgccgcaggatctgccgtggggataccgctacttccacgtgaaagacccagacggcaacggaatcgatctcgtacaaaagctgtaaacagaaaaggcacggaggccgccccgcagggaagccgccgtgcctttatgttttgaattattcgaactcgccgctgtagatttccgtgccgtccgcattgttgtagacaatgcgaaccttgacgttttcttcctcgacctgttcctgaagctcgtcggcaatgccttcgaacacgctgcgctgctgctccatgccgctttcgagcgcgctgacaatagccgccttgatcgtctcgtcggagagatcgatcgcctcgccgaaggtgaaggtgtagatcagcgtgttgccctcgccggcgatctccacagtgaattcgtcgctggacatcgagccgagctgttcgtcgagctgcttcgcgacagtctcgttcttcaggtaggcctcgatgttcttcggcttgccggagcaggcggtgaacagcagagcgacggcgagcaggcatgccagtacggcggcaaagcgtttggtgttcttcatctcataaaaccccttttttgaataaaatttgaataaattttgaacaaagccattatagcatggcaaaaggggaaaagcaatacgctttagggcaaaatttatgcaaaggttgcggcgtaaatctcagagccgtctgcgtagctgtacacgacgcggatggcgacgtcgtccccctgcacctgtgcgcggatctggtcggcgaggccctcgaacacgctgcgctgctgctccatgccgctttcaaaggcgctgacgacggaggccctgagcgattcatcggagaggtcgatcgcctcgctgaaggtaaagttgtaaatcaaggtgtttccctcggcggaaaccgccacggagaattcatcgctcgacatggccgcgagctgctcgttgagcatgcttgcgacggtttcatccgcaaggtaatccgcaacggtcgcgtagccgtaggtggtcggcacaacagccgcttccgcgctgaagctgctttccgaggtgacgtcgcccgctgtgctcgtaaaggtgtgcgcgtaaagctgcgtgccgtctgtgtcgaagaagtcgtagcggatcgcgattgggtccgcatcgacaacggcgcacagctcctgaaaatcgaccgtgaaggcgtcgctgttgtcctcgcagtaggcggtgagatccagcacggcgtcctcggcggtgtaatagccgtcgacatagggttccacgaaggtgagcgcgtagacgagcgtgttcccctcgccgtaggcggtgccggtaaagtcctcaaagccgaattcatcgacgaagcgcacgccgaccgcgggatcggccatgcactcctcaaccgtggcgtagtaaaggggctcgggcgggttggcgtagtcgtaggacattacctccgtgccgtccgggttgcggtagacgagccggatcgtgatgccgtcgatcttcagctcctcgccgagcgtctcagcgacttcttcaaactgatccttcccgcttgccagctcttcgaggaaggtgttgttccacattctgtgctcggattcatccgaccactggatcgggtcagcataggtgtagtcgtagatcagcgtgttgccctcggcgagcgcctgcgcggcggaatacatgccgtccatattggcggactccatggcggcatccacctctgcgtcgacctgttccttgatgtccgggttggcaaagcattcctcgagcgtctcgtagtgtgtctgaaaaatgccgccgagcacggaggtgatcgtcgagcagccggtgcagagcatcgtaaaggcgagcaggcacgcggcgagtgctgtgaagcgttttgcgggtttcatgtttttgactcctcttctttgttttgctgcttgtggttggggctgcttccgtgcagccggggtggggaatccggggatgcggcgtctttcccgccttatctatagtatggcggaaaggtgccgtgcgcccgcgtccggcggctccgtatggcggatatgtatcgaaaaagccgaacggggcggggcgcggcccgcggattctgttggtttagctgataaaagtatagcacagacgattataaaaagcaatcggaatcggccttgtatgcgcgcattttgcacatacatttctttgatttggggcttgcttcctatcctgcgatatggtagaatcaattcgtatgctcccggtggcttggggctgcgcaaaaaaagagaggattgattgccgtaatgaaaaatataaagaagctcatggctctggttctggcggctgcgctgtgcgtgtcccttgcggcgtgcgccgtaccgcagacgtccgccgacaagctggaaacctcgagcacgaccgaggacggagaggccgtcaccgaggacaaggaccccgcggattatgaaacagacattcagggcctgtgcaagttcttcgaggagagcggcctcaccgccggcgaaaaggtgcagatgtcctacgatgttatcggcgctgtaaacggctacaagtacgcgtacagctacaacgattccagcgtgcaggtcgagctgtatgagttcccgaccgagaatattccggaaacggcgcaggccgtgatcgattcggtgcgcgaggcgggcagcttcgagattttggacagcaccgtgccggcacagatttcggaggacggccggtttatgatggtgtataccgacgcaaaggcggagggcgacgagaccagcaaggcgcacaaggcacacgtgacggcgtgctttgaggcgttctgcgattacgccgcaggcaagtaaaaaagagacgggagggcatacgctctcccgtccttgatgctttttcaggcaaaattcaggtttgggggaaatgaagcaatggacaaaaaggatatgccccgccgccgtgaagcgatggagctgcgtatccggcgcacgatggcggcgctcgagaaaaacaatatgagcgcctactatgcgccggaaagtgcggacgcggtgcgcattgtggaggagctgctcggcgagggggatgtgatctcctgcggcggcagcgtaacgctggacgcaagcggcgtaaaagcgctgatgcgcagcggaaagtatgattttctggaccgcgacgcggtggagacggatgccgagcggcaggcgatctaccgccggacgttttcggcggatgcgtttttgacgagctccaatgcgatcacggagcgcggcgagctgttcaacatcgacggcggcggcaaccgcgtggcggccatgctgttcggcccgaagaaggtgatcgtcgtcgcgggctgcaataagatcgtgcgcgatctgaatgcggcgaagctgtatgtgaaggcggtctcggtgcctgccaacgcgctgcgcctgcacatcgatacgccgtgcacgcatgcggcgtgcccgggcacggacggcgacctgtgcggcgggtgcgcatcggaaaatcgcctttgcgcgcagtatacgattatggcgcgccagcgcgtgaagggccgcgtgcatgtcattttggtcggagaggagctggggtattaacgccatgaacatgaaaagaaaaatacagattatgatgctccgcctgcaaatccgcctgcgccggcgcaagcgctcgcgcggcggctatgaaatcgatatgtgcaacggcccgcttttcggcaagatcctgcgctttgcggttccgctgatgctttcgggcatgctgcagctttttttcaacgcggcggatattatcgtcgtcgggcagttcgtcggccatacggcgctggcggcggtgggttccaccggcgcgctgatcaacctgctgatcaacgtgtttatcggtctttccgtcggcacaaacgtgctggtcgcgcgctattacggcgcgcgcgacggcaagcagctgcatgatacggtgcacacttcggtgctcacaagcctcgtgagcggcacggtgctgatcgtaatcggcctgctgctcgccgagccactgctcacgctgatgggcacgccggacgacgtgctcagtcaggcggcgctctacatgcgcatctatttcgtcggcatgccggcgatgatgctctacaatttcggcgcggccattctgcgcgcggtaggcgatacgaagcgcccgctgtatttccttttgatctctggccttgtcaacgtcgtgctgaacctgatcctcgtccttgtattccacctcggcgtcgccggcgtttcgattgcaacggtgacatcgcaggtcatttcggcgcttcttgtcgcgcggtgcctcatcaagacggacgcgccgtaccgccttgagctgaagaagctgcgcatttcgaagagcaagctctttgagatcgtaaagatcggtctgcccgcgggcatgcagggcgccgtgttctcgatctccaacgtgctgatccagtcttcgatcaactcgttcggctccacggtgatggcgggcagcacggccgcctcgaatatcgagaatttcgtctatacggcgatgaacgctatgcaccagacggcgctttcgtttacggggcagaatgtcggcggcgggaaataccaccggatcggcaagatcatgcgcatctgtgtgctcgatgtaacggtgatcggcatcgtgctcggcggcggcgcgtatcttttcggcaccgcactgctttctatatacacgtcggacccggcggttatccagtacggtctggagcgcatgctgtttgtctgcctgccgtacttcctctgcggcatcatggatacgctggtcggctctctgcgcggcatggggtattccattatgccgatgatcgtctcgctcaccggcgcgtgcgcgctgcggattgtctggattatgacgatcttccagatggaccgcacgctttcgacgctgttcctctcgtatccggtctcgtggcttatcaccgcgctggcacacttcatctgctatttgatcgtgcaccgccggtttatgaaaaagcacacgttggagccgcagccctaaaccgcacgctgcaagcaaaaaaacatatatatagaaaggcgcccgcaggaaataccgtgcgggtgcctttctgctttctataatataggttcagaggaatttggggccgacagcgggaaacattacagcggcgcgcgcagcagcatggcgatcatcagggcgttgacgagcgccacgaccagcacgcgccagagaaagacgagcgaacggcacagggcgctgcgggaaacgtggggcattgggcagatctccttctcagttttatagtccggcaggaaaaataaatctggacttttttcgaaaaatattttaaaatatcttgtgtcggacaagtatatgagcatgcaaaccaaaaaatgccggcgcagatatagactatatatagtgcggtgggtgcagtaaaatgtcagatattgtatgcgcgaaggcaatcgaaaaaaatcgaaaaaaactttgaaaaaagtgttgacaaaacgcttgctgcgtggtattatagtcaagcgctcgagagagacggcaaaaaacggaaagccgaaaggctgaacgaaaagagccggagggagcgcaaaggaccttgaaaattaaacaacgagagaaagaatggaacctgtaatttctttgaggagactcaaggaattaaagagtaacagaactcaaaaaaatctgtgacagacgtcagagacgtcgaatgagctgagagctctaagcgtgatttggacgcggaagcgtttagataacattattagagagtttgatcctggctcaggacgaacgctggcggcgtgcctaacacatgcaagtcgaacggagaatcaggagcttgctcctgattcttagtggcggacgggtgagtaacgcgtgagtaacctgcctttcagagggggataacgttctgaaaagaacgctaataccgcatgagactacagagctgcatggctcggtggtcaaaggagcaatccgctgaaagatggactcgcgtccgattagatagtaggcggggtaacggcccacctagtcgacgatcggtagccggactgagaggttgaacggccacattgggactgagacacggcccagactcctacgggaggcagcagtgagggatattcggcaatgggggaaaccctgaccgagcaacgccgcgtgagggaagacggttttcggattgtaaacctctgtcctctgtgaagataatgacggtaacagaggaggaagctccggctaactacgtgccagcagccgcggtaatacgtagggagcgagcgttgtccggatttactgggtgtaaagggtgcgtaggcggattggcaagtcagaagtgaaatccatgggcttaacccatgaactgcttttgaaactgttagtcttgagtgaagtagaggtaggcggaattcccggtgtagcggtgaaatgcgtagagatcgggaggaacaccagtggcgaaggcggcctactgggctttaactgacgctgaggcacgaaagtgtgggtagcaaacaggattagataccctggtagtccacactgtaaacgatgattactaggtgtggggggtctaaccccctccgtgccggagttaacacaataagtaatccacctggggagtacgaccgcaaggttgaaactcaaaggaattgacgggggcccgcacaagcagtggagtatgtggattaattcgaagcaacgcgaagaaccttaccaggtcttgacatccaactaacgaagtagagatacattaggtgcccttcggggaaagttgagacaggtggtgcatggttgtcgtcagctcgtgtcgtgagatgttgggttaagtcccgcaacgagcgcaacccttgtgattagttgctacgcaagagcactctaatcagactgccgttgacaaaacggaggaaggtggggacgacgtcaaatcatcatgccctttatgacctgggcctcacacgtactacaatggtcgttaacagagggaagcaataccgcgaggtggagcaaaaccccaaaaacgatctcagttcggattgtaggctgcaactcgcctacatgaagttggaattgctagtaatcgcggatcagcatgccgcggtgaatacgttcccgggccttgtacacaccgcccgtcacaccatgggagccggtaatacccgaagtcagtagcttaaccgcaaggagagcgctgccgaaggtaggattggcgactggggtgaagtcgtaacaaggtagccgtatcggaaggtgcggctggatcacctcctttctatggagacctagcattgactgcggttaatgcttaacattccaaggttagattacagggtacgctttcaatcgttgtttaattttgagggtctttgaaaagattctcaagaacggggcatcttcgttctttctaaagaatatgggggtgtagctcagctgggagagcacctgctttgcaagcagggggtcatcggttcgatcccgttcatctccaccaagggccgaaaggttcgaatagccggtggttttaactagatatgggcttatagctcagccggttagagcgcacgcctgataagcgtgaggtcggtggttcgagtccacttaagcccaccagcggaggaatccgccaagtaccttgaaaactgaataaagcgaagcagataaaaatgcgagaaaactgttatttactagagaattattatcaggtctaacgatccaaaataattgtttagggtaataactgcaatttcgaagaagcgaaataagtaaagtttattctttgcaaagagaaataactacaaaactcatttctaattccaagaagagaacacatggtcaagctacaaagagcgcaaggggaatgccttggcactaggagccgaagaaggacgcgactaactgcgataagccacggggagccgtaagtgggcatcgatccgtggatttccgaatggagcaatccgattagagtcatgtctaatcatcatgcactgaatccataggtgcatgaggggaaccgcctgaactgaaacatctaagtagggcgaggaagagaaatcaaccgagattccgctagtagtggcgagcgaacgcggaagaggccaaaccagaagtagtaatacttctggggttcggacagcaacgtgtaggtttgagcttagcagaatggcatgggaaggccaacgaaacagtgtgagagtcacgtatgcgaaaagcgagagccgctagctgtatccagagtaccgccggacacgtgaaacccggtgggaacacggggggaccaccctccaagcctaaatactacctagtgaccgatagtgtatagtactgtgaaggaaaggtgaaaaggaccccgggaggggagtgaaaaagaacctgaaaccttgtgcttacaagcaccgagagcccatcaacgggtgatcgggtaccttttgtagaatggtccggcgagtgaatgtaactggcgaggttaaggacttcaggtctggagccgtagcgagagcaagtctgaatagggcgtatgaagtcagttgtattcgacccgaaaccgggtgacctacccatgtccaggttgaagtggaggtaaaactccatggaggaccgaaccgactcccgttgaaatggtagcggatgaggtgtgggtagcggagaaattccaatcgaacccggagatagctggttctctccgaaatagttttaggactagcctcgtattagattaccggaggtaaagcactgaatgagctaggggccgagaggttactgaactctatcaaactcagaatgccggataattgatgtacgggagtcagacagtgtgagataagtttcattgtcaaaagggaaacagcccagacccacagctaaggtcccaaagtacggttaagtggaaaaggatgtggggttgcacagacaaccaggatgttggcttagaagcagccactcattaaaagagtgcgtaatagctcactggtcgagtgaccctgcgccgaaaatttaacggggctaaatcgtacaccgaagcttgggatgcatttatgcatggtaggagagcgtcgtataaggggtgaagtcagagcggaagcgctggtggactttatacgagtgagaatgccggaatgagtagcgagaaatatgtgagaatcatattggccgaaagtctaaggtttttggaggaaggttcgtccgctccaagtaagccgggagctaaggtgaggccgaaaggcgtagccgatgcacatacggtagatattccgtagccgccaaaagatttaagcaagaggacaccttgaaaggacttgacccgggcgatggttgccccgggcgaaagggaccgaaatttagtagggaagcaagtttggacgagggcgagaaaagtcttgtgtatatcttcggcgcccgtaccgcaaaccgacacaggtagataggaagagaattctaaggccaacgggagaagggtagttaaggaactcggcaaattgaccccgtaacttagggaaaaggggtgccacagcgatgtggccgcagagaataggcccaggcaactgtttatcaaaaacacaggtctctgccaaatcgaaagatgaagtataggggctgacacctgcccggtgctggaaggttaagaggagatgtgcaagcattgaattgaagccccagtaaacggcggccgtaactataacggtcctaaggtagcgaaattccttgtcgggtaagttccgacccgcacgaatggtgtaatgatctgggcactgtctcaactacccgcccggcgaaattgtagtaccggtgaagatgccggttacccgcgacaagacggaaagaccccatggagctttactgtagcttaatattgggtttcgataatttatgtataggataggcgggagacttagaagcagtggcgccagccattgtggagtcgacgttggaataccgctcttaagttattggaattctaacctgcggccgtgaatccggccgggggacattgttaggtgggcagtttgactggggcggtcgcctccaaaaaggtaacggaggcgctcaaaggttggctcagcatggttggaaaccatgccctagagtgtaaacgcgtaagccagcctaactgcgaggatgacggtccgagcagtaacgaaagttggagttagtgatccggcggtatgagagtggaattgccgtcgctcaacggataaaagctaccctggggataacaggctgatctcccccaagagtccacatcgacggggaggtttggcacctcgatgtcggctcatcacatcctggggctgtattcggtcccaagggttcggctgttcgccgattaaagtggtacgcgagctgggttcagaacgtcgtgagacagttcggtccctatctgtcgtgggcgcaggatatttgaggagagctgtccttagtacgagaggaccgggatggacgcacctctggcgcaccagttgtcacgccagtggcacagctgggcaactatgtgcggaacggataaacgctgaaagcatctaagcgtgaagccgcctccaagattagatatcccatggcgtaagccagtaagaccccttgtagactacaaggttgataggctgcatgtgtaagcacggtaacgtgttcagcttggcagtactaataggtcgagggcttgaccatatcacttcttgagatcttcaagattgcgcacacttctccttcttatccgcttctcctttattcagtttttagggtatttgcccttcacatatagcttacgcgatcgcgtaagctatttttttatccttaaattccccgtaatttggcatgccctgcccgccttggctgtgttaatcggcttgtccggtgcctttgctgtggaatcccgcgccggttttgattgggcgtaccatgtcggtttcaatgacgatcgcatctgattcaaacaggactgcgcttcaagaattgccggtgaaaggcgcacgggaggcagcccggtcctacagctaaggcttcaagtacggttaagtgaaaaaaatataggaccgcacggaccaaaaagatgatgtatctgtgaaagccgcgtttgttgacaaatgttccggacgatgctatgataaggccactgtggagggcgtgaaaatggtttggatcgaattgcagggaaagtggctgccggaagccgcggagcaggcgatgcgggtcgtgcgggacatattgaaggatattctgcgccttgaaacagaccccgcacattaccgcgtggaaatagccggcgcggccgtgcgcaggatttctgtgcaggtggacctgtttcccgcggggagcgcgcgtagccgccgtatggcagcgcagcagatgcaggagcgattggcgcagacgctgggactgcccgacgcgcgtgtctccgcgtcgatttgctcgccgcagcaggaaagggaggaaatgccatggagaaattagcgattcgcgcggtgtgcgggggagattatcccgcggtatcgtcgctttacgcttatgtgcatgcaatacatgaggaaaaccgcccggatctttttaacgcgttggaggaaccgcttacggcggcgatgtttgaacaaatatgtgcggacagcgatggtattgcgctctgcgcggtatagagcggccgaatcgccggcttcgcgtatacgcgcatcaaaccgccgagtacaagcccgatcgcgcgcccgcgtgtgacggtgtatatggaagatttggttgtgcacccgaacgcgcagagaaccggcgtcgggcgagcgctttttgaggagacacacaggctggctgccgcccggggcgcggtttcgctggagctgaaggtgtggacattcaacagaaatgcgcaggaattttatgggcgtatggggatgcgtccgcgcagcgtgatcatggagatgccgcttgcggggattgggagttttccacggaattgtgatgtgccggtggaaaacagacgcgattgagttttataccggcaggcggagaaactccggcattcaaataaaaccgaaggagcgattggatgatttatttaaaacggaataatcttttgatccgcgaactctgcgaagcggatatagagccgattgttgcgggggaaatcgcgcagggctggcttggcgcaagccgtgaaaagtacgacatgcgtctgcgcgatgcggcggaggggcgatgtgctgcgctttgcgcagagcttcaggggcggcccgcgggttatgtcaacctgtattttaaggcgtatccgccgtacgcggagacggcttggcccgaaatcgtcgacttcggcgtgcttgaaatttaccgaaatcgggggatcggcacggcactgatggatgcggccgaggcgctcgccgcaaaacgcagcgatacggtctgcctcggcgtcggcctgcacagcggctacggcgcggcccagcgcatgtacgtgaagcggggctatattccggacggcaccggcgcgtggtatcgggggaagccgctcgggcagtacgcgccctgcgtcaacgacgacgacctgaacctgtattttacaaagcggctgcgctgaatttctgccggcgtatgcgcggcgcggtgcggcagataataagcctgtcagtaacgtgattcccgaaggcgggaatcggatcggaggaaatacaatgaaaaaaataatttcggccgttttggcggcaatttttgtactcagtttttccgcctgcagggcgggaggatccgaaaattccggcgcttcgtccgatgcggagcagccggcggtcgggagcgcgctggagctgctgcagacggtgtggaacagctatgcggacgacgaaaaattttccgtcataggcggcgatgcgtcggaagaaaacatgacgacggacgcgccgggaaaatttgacactgcggactcggccgcgctggattcaatgctcggctttccggcgggagaggccgataaaatcgacgacgcggcctcgctcgtgcacatgatgaacgccaacacgtttacctgcggtgcgtttcatgtacaggatgcggcggcgctggacgacgtcgccgcggcggtgcgggaaaatatcatgaaccggcagtggctgtgcggttttccggaaaagctcgtgatcgtgacggtcggcgactatgtggtctcgttcttcggcgccggggagattgtggacgcattcggcgaaaagctggcggcggcgtaccccgccgtgcagacggtctgcgatgaaccgatcgcgtaaaagattctgattcgggggcgcgcctatgctgttttcaagcattccgtttttgtattatttcctgccctgcgccgttttgctgtattttctcgcgccgaagcggctgaaaaacaccgttttgctgcttttgagcttgtttttttacgggtggggcgagccgcggtatctcgttttcatggcggcttcgatcgtgcaggggtacgtgttcggccgtctgatcggaaaataccggggaagaaggccagccaaggtttttttggccgcatcggtgcttttcagcctttccctgctcggatactgcaaatacgcggatttctttatcgcgaatttcaacgccgtgacgggactttccgtcccgctgctgcaaatcgcgctgccgatcggcatcagcttttacacgtttcagattttaagctatgcggcggatgtctaccgcggcgtgcccgcgcagaaaaattttatccgcctcgccgtttatatcgcgatgttcccgcagcttgtcgcggggccgatcgtccggtatgcggacatcgagccgcagcttgcggagcgggtccacacgctcgagggtgcagcggccggcgtgcgccggtttatattcgggctttccaaaaaggttttgctcgccaacgtgctcggcgcgcttgtggaggccttcaaggcgtcggaggaaaaatccgtcctgtatttctggctgtacgccgccgcgtataccttgcaggtctacttcgatttttcgggctacagcgatatggcgatcggtctcgggcggatcttcggctttcgctttgccgaaaatttcgaccacccctacgcggcgcggagcataaccgcgttctggcgcaggtggcacatttcgctcggcacatggtttcgggattatctgtatatcccgctggggggcaaccgcgtcagccggccgcgctggctgcttaatattctggtcgtttggatggcgaccgggctgtggcacggcgcggcgtggagcttcgtcgtctggggcctctggttcgcggctttgctcatgctcgaaaagctgtggctgctgccgcggcttgagaggcaccggtggctcgggcacgcgtacacgctgtttttcgttgtgctcggctttgtgatcttcgacgccgcgagcatttcggacgcggcggcgtccattgcggcgctgttcggcggcgcgggacttccggcggctacggcggaaagcgcctacatgctgcgcagctacgcggtcgtgctggggatcgctgcgatcgccgcaacgcccctgccgcagcgtatcgcggcggcgatgcagagccggcggcgtattcgcccggtgctctatgcggcggaaccggtcgttttgctcgggctgctcgcggtgtgcacggcgtttttggtcgacggctcgttcaacccgttcttgtatttccggttttaagggggcgcggcatgaaaatcaaaaatacagcggtcgtcgtcgcggcggcgctttttgtggcggtattttcgctgtggagcattttgaagcccgctgcggcgcagtccgaggcggagcgccgcccgctcgcccagatgcccgaaatcagcgcggaggccgtgctatccggcgattttatggcggattttgaggcgtatacgctcgaccagttccccctgcgcgacgggttccgcacgctcaaggcggttgcggcgctcggcattttgggccagaaggacaacaacgggatttatgtgcgggacgactatgcgtcgaagctcgattatccgatggatgcggcgtcagtcgattacgcggcgagccggtttcggcttgtctacgaccgttttcttgcgggcaaggacatgaatgtatacctttccgtgatccccgacaaaaattattttatggcggcggaaaatgggtatcccgcgctcgattatgcggcgctggtcgaccgcgtgcgggacgggatggatttcgccggttacatcgatattttcccccggctgtcgctctcggattactaccgcaccgacacgcactggcggcaggaaaaaatcacggacgtcgcgcaggcacttctcgagcagatgggcgcggaatacaccggggaatatacggaacggcgaatagactttccgttctacggcgcgtattacggccagtcggcgctgccgctgcggccggacgatctggtctatctcgaaagcccggtgctggaaggctgcacggcctacgattatgagacggaaagcgagatcccggtgtacaatctcgcggaagcggcgggccgggatccgtacgcgctgtttttgtcgggctccaaatccttgcttgtgctcgaaaaccccgaagcggagacagaccgcgagctgattttgttccgggattccttcggcagcagcctcgccccgctgctccttgagggctatgcgcgggtgacgctcgtcgatatccgttatatatcgcccgcccttttggaccggtttatctcgtttgcggatcaggacgtgctgttcctctacagtacgtccgtcctgaacagcagcgagacgatcaagtgaatagggcggcggctgtgccccgccgggcgtatttaaaatgtgaatatattttgcttcggcccggttttcggcgggccggaggatgaaatcgagccgcgcggcctcaggcttttgccgcggtctgccgtctgccgaatacatcctgcaaaaatgcgtcggcgagcggcagccaaagctcgaaattcggaaagtttaccgcgccgtccacaatgcggatgcctgccttgccgtggggtgtgccggcaaaggtgtgcacctcgaccggcacgccatgggcgattaagtcggggtaggtggcgtgcaggttgtccattgcattgtcttcgcggccgacggcgaaaaaggtgggcggatagacgacgccggtgtaatccactgagacgccggcgaaccgggggccgtacacgcagatgaaagcgtccggcgcgccgcagaatgcgtccagcgcatcgggcgtatagccgggaaaatgatcggccacctttttttcgcccgaatagtggaggatgcaggcctcgccggtgacgccgccgttcgagtacccggcaaaggcgatgctgtgcgggtcgatcctgtacttttctgcgtcgcgccggatgatgcggatcgccctcgcggcgtccgcgccgcattccttttcgctccacgggttatggttcgggcggttgttgagcatgaaggcctgataccccatcgcgagaaaatcgaggcagttctggtatccctccggcagggagcaggcgccgtggtcgccgccggcgcagacgacgaccgctcctttcggctgcacgtcgtcgggcaggagcagggcgtacatgtgcggcacaaaatccgggtcgtgattgtagcggtatgcgctgttgtcggtgtaatcggtcagcgtgggaaccccgccctgcggccaaagctcgatgcgctgcggcgcaccgggcttttttcgcatgcccgcgcgctttttagaaaaggctgcgatccgctcggcgcgctctgcctcggggcagcggtagacggcttcgttcagacggtagagctcgacgagatcctccgccgggtagcagggggcgtcctcgaagatctccaccgcggcgtgctcctccggtccgaacacggccttgatgtcgcgggtctgctcgaacattttggtgagaaaatcctgcatggcgtcgtttttgactggcataaaatcactccgttctgctgtttctttgtgaaaattggggtctgcatacgctgcaatcaatagggggattcaaagggggatttgagaaattttagattattttagtgctgaaactgcgcgcttgttggcgaaatagtaccatataattctgcgtttgtcaaatttttagtgaaaagaaggttgacaaaccgctaaaactaaactaaaatatttattgaagtttaggagatttcagcaagcgccgcgcaaagccgcggttatcccgaaaatgccccggaagccgcctgcgtgtacgcacgctgcatacaggcgcccgcctgccgcgtcttttgccgtgcggcaggctgccggacacaggagaggaccgccccgcgccgggaaggccggagggggcggaaaatataccatcaaaatcatggagaggaagaggatacgctatgatcaccgaaatgaagaaaattccaatcacggaggaaagccgtccctttgccacggcgctgaaggtctgcccgctggagacgctcggctacgtggaggaggagtttttccagacgggcacggccaacgtctaccgggagggcgaaggcgcccccgtggtagagatcgccgacgcgccgtacaccacccgccttttggtccgccggccgcgcgacccggagaaattcagcggcaacgtcgtggttgagatcctaaacgcctcggcgatgatggatatcgaccgcatctgggtcaacacatggcggtattttacccggcacggcgatatttacatcggcatcaccagcaaggggcatgttgtggatgcgctcaagggctgcgacccggcgcgctatgcggcgatcaactgggcgaacccggcgccggagcgcgttcccagcgaggctgtgcgcagcagccggttcggctttttgccgcagtacgagcaggggcttttttgggatatgctcattgacctcgcaaagctgctgcggacggattcgccgctgaacccgatcgcgggcttcggcagggcgtggctctatctttcggggtggtcccagtcgggcgcttatctctcccgcgtcgtcaacagttttgcctatctgccggaaaactgcggggcgggcccgctgttcgacggctatctgaatgccggaagcggcgcctccaacgcgccgctgaatgcctacgagccgtttggcacgctgttccaaagagggcggcccgccgcaagcctgctctgcacgaaggagccgtgcatcgcggtgaatacggagagcgaaaaccgcagcaccttctggtacggcgatttcgacgagccgagctgcaaattccgcacgtggcagatcccatgctcgagccacgacagcctctataacctcgtgacatactaccgcctcggctacggcacggagagcctgcaccgccttggccgcgagctggaatgggagggatatcagggcgaggcgctggacacgccgtattatttcgtgttccatgcggcctttgaggcgctttaccactgggtgcgcgaggggattcccgcgccgcatgcgccgaagatcgagacggaaatgacatatgccgccacagaccccaccggcgttcaggcagcgaaccggacggattcattcggcaacgcgctgggcggcatccgctatcccgcggcagactgccccacgtcggtctgccagagctacaccgtccgcgaggacggcggcctccagcagatgttcggcacggagtacccgttcccgccggagaagctgaaggcggtgtacggcgatctcggccattaccgcgcgctggcggaaaagagcgccgacaatgcggtcgcccacggctggattttggcggacgaccgggatgagctggtccgcattgcggtcgagacggccgcacgccgcggcctgtaaccgcagaaaactgaaaaacggctctcagcctagcgggctgggaaccgttttttttgttgtattcggcaaagccggggagcggtcgccgcgtgaagaagcggcccggcgcgggagcttgccggtcagcgcaggggcttgccgccgcggacgacgagctgcgtgccgatgcgcacatggcagcaggggcagccgtcctcctgaatcagccgcagaagcagccggagcgcctcgcgcccgcgcgtctcggagcggatgtcgatggaggaaaaagcgtaaggcgaggggatgcgcccgccgaggttgtcgaagccgatgatccgagggccctgcgccgcgccctgccggcgttcggccagcaggggcaagagcgaaaaggcaagataatcggaggagaagaaaagcgcgtcgggcgcatcggccgcttcctcgagctttcggcaaaagacctcggcttcctgatgcgcggggagatagagccagaggggctgcagccccttttcctccatccagcgcatataggcctcgcggcgctcccgctcattccggtgcatgtggcctccctgcggctcgacgaaggcggggcggcggcagccatgcgcgtacagccagtccagcccctgcatcataccgccctcgttgtcgatggagacggagcagaccggctggccggggagcgcgtggtccaccagcaccacggggatatgcagggcaaacagcgcgtcaagctgcccggcggagagcagcggggcgttgaacagaaggacgcccgcgcagtcccgcagtgcctcggtgttcagcgggttgtccgcgtcccagtattgaatggtcgtcacgcagttttcccgcgaggccagatccagaatgccgcgctgcaaatccatgaaaatataatcggttcccgatgtgccgctgaacaggggacccgcggcggttctgcaaaacaggaggaggatccgggtggcgggcgcagcgctttttttcacctgatagccggcggcctccacctcggtcaggattcggctccgggtctcgtccgaaaggccgggcctgccgttgatggcgagcgagacggcggaaacgcttacgccgagccgctccgccagctcctttaatgtgagttttcccatagtttcaccgcaattttagtagagtatagtttttataataatgccataaaatgtccgggaggtcaactgcgttttgcgcctgcacggggcggaaggcaaaacgaataactaaaactttacaaaatattttacaaaaccgtaatgggcgagaaaatgagctaaattaaaacacaagagaacatctgaaaataaattgactaaaaaatactgttttttctcaaaaaactattgacttgttcgggtttgcgtggtattgtttgcttgcaaactaaaatttcacataagtattaactaaaataagcgaaaaacaagcagaaaaaacccgcaaaacatttatgtgaaattcagttgcaaaaaatattttgaggtgaacaaaatgaaaacgacccccaagatcattgcaatgctgatggcgcttgtgctctgcggctcgctgcttgccggctgcggcggagacggcggcgccgaaagctcggcgtccggtcagaatgcgggcgcatctgccgcggaggacggcgcgtacaccattacgatggcgtacatcggcagcgagcagcccaatgaggaaagcgttttggctgcggttcaggagcaggtcaaggcggataccgagtttaatctcgagcttatccagctcggcttcggcgattaccagcagaagctgaacctgatgctttcgggcggcgataagctggatgttttcccgattggcccggggctggccggcacgtacaaaaacgccgggcagcttgtggagctcacggagctcatcgacacgcacggtcaggggatcgtggagcttatgggcgagggcgtcgccaagagcggctcgctcaacggctttgtttacggcctgccctccaataaggaatccgcctcccgcaacggctttgtcatgcgcaaggacgttgtggaggagctggggatcgacgtggaatccatcaacacgatggacgagatgacggcggtgttcgagcaggtgaaggcggcgcacccggagctggactgcgttgcgggcacgaatctggtcatcggcaccgcgatgtgggacacgctgggcgacagcttcggcgttctgatggactgcggcaaggaccgggaggtcacgaacctctttgagagcgaggagtaccacaaacgcgtttcgcgcatccacgactggtaccagaagggctatgtgaagctggacgccgccacctccacggagacgacgcagaacctgatgaaatccggctcgctcttctgctacatgtcgtccatcaagccgggctttctcgtgcaggaggaggccgcgaccggcatggagctcgtcacaacgtatatcgacaacgacgacggcagcatggcgaatatcatctgcaccggcaatgtgaactacttcgattggggcattgccgcgcagtctgaggacccggaaaaggccatggagtttttgaactacatctacacgagccccgaatggaacaacctgatgaatttcggcatcgagggtcaggattacgtccgcgtggaggaaagcgacgttctgatcgactatcccgagggcacggacgcttcctctgtataccacctgaacatgggctggatgctgccgaaccagtttatcggctatgtttggaacggccagccggaggatatctgggagcagtatcaggatttcaacgcgtcggccacgtattccgtcgccttcggcttcctgccggatacctcgtccctcgcgacggagctgaccgcgctgtccagcgtcaacagcgagtacaataacgcgctggtcaccggctccgtatcgaatgtggataccgccctcagcgagttcaacgaaaagctgtatgcggcgggcctgcaaaaggtgatggacctcaagcaggagcagctcgacgcgtggtttgaggcgcagggcaagtaaggccgtaggaaagaggaaaaaggcggagcctcctgcaaaacggttcgggaggcgccgcccgtctttatcaagcaggagccggagggcggaaacgccggccctgccgctgtgaggtgcaacaatggcaacaaatgcgatcgctgtgaaaaagaagggctccaaggcggagcggatcaggcggtggctgccgctgtatctgatgatgctgcccggcgcgctgtatctgatcgtcaacaactatctgccgatggccggtctggtcatcgcctttaagcaggtggattttaaaaagggcattttcgcgagtgactgggcgggcctgaaaaacttcgagtttttgtttgccagcgacgacgccgcgctgatcacccggaacacactgctgtacaatctcgtttttatcgtgctgaatacggtgctcggcattctgctcgcgatcttcatctgcgatgtggcgagcaagaagctgaaaaaaatctaccagagcgccattttattcccgtttttgatgtccatggtgatcgtcggctacatcgtgtacgcctttttcagcatgcagagcggcattgtcaataagaccatcctccccgcgctgggaatggacccgatcttctggtacaacgagccgaaatactggccggcgattttgattttcgtcaatgcgtggaagggcgtcggctacggatgtctcatctatatttcgtcgattaacggcatcgatcccacgtactatgaagccgcagagctggacggcgcaggcaagctcaagcagatctggcacatcacgctgccctgcattctgccctccgtgatcacgctgacgctgctcaatatcggcaggatcttctattcggatttcggcctgttctatcaggtgccccgcaattccggcatgctcttctccacgacgaatgtcatcgatacctacgtgtaccgcgggctgatgcagcagaacaacatcggcatgtcgtctgccgcgggcttttaccaatccatcgtcggctttgcgctcgtcctgatctccaatctggttgtgcgcagggtcagcagagaaaacgccttgttctgaggcggggaggaaacatcatggctaaaagaaacagaggctaccaaatcatgatcaacgcggtgatgctgctggtcgtcgtcacggtcgttgtgcccttcctgctgctgttcatgtcgtcgatcacggacgaaaacacgctgctcgtaaacggatattcctttttccccgaaaagttcagtctgggggcgtatgcgtacatcttccgctccggcgataaaattttccgcgcctacgggatgaccgtgctcgtcacactgctcggcacgctcgtgaacgtgaccctctccgcgctgttcgcctacccgctgtccctgaagaacctgccgggcaagcggggcatcacgttcttcgtgttcttcacgatgcttttcaacggcggcctcgtcccgtcctacatcctgtggtcaaattacatcggggtcaaggattcgatctggggcctgctgctgcccggccttctgatgagcgcgatgaatgtgcttttgatccgcacctatttttcgacgagcattcccgacacgctcttcgaggccgcggaaatcgacggggcgggccagatgacgatttttgcgaagattgtgctgccgctcggaaagccgattctggtgacgatcggcaccttctccggtctcgcctattggaacgactggacaaacggcctgtactacatcacaaagcgcacagagcttttcactatccagaaccttttgaaccagatggtgtccgatttgcagttcttgtctcaaaatgccggaaacgtgtcctccgacgtcgcgctcgagctttcgaaggtgccgtccaccggcgtgcagatggcgatcgcctttgtggcgattctgccgatcattttgattttcccgttcctgcaaaagtattatgccaagggtattgcattgggcgcggtgaaagggtaagatattttatataggaggatttcatcatgattacagaaatgcagctggttccggtcacggcggattcccatccgttcgcatcggcacagttccactgcaggctgtcggaaatcggctatacggaggaggaatacttcctctcgggcacggcgaatgtctatgaggagggcgaaaataaccgcccggaaattattttccgggacgccccgtacacaacgcgcgtcctgatccgccggccggccgacaagagccggttcagcggcaacgtggtggtcgaggtgctcaatgccacggcgatgatggacatcgaccgcatgtgggtgaacagctggaagcattttacccgcagcggcgacgtttacgtcggcatcacaagcaaggggcacgtggtcgacgccctcaagcgcttcgaccccgcgcgctatgcgccgatcagctgggcgaaccccatgccggagcgggcgattccgccatttgccaaagggccgttcccgttcctcgcgcagtatgaatccggcctgttctgggacatgcaggtggagctcgcgcggctcctgcggtcggaggatgcgaagaacccgctggccggctggggaaagcgctatctgtaccttaccggctggtcccagtccggcagctatctgtgccgcatcgtgaaatccttcgcatatctgccggaaaacaccggaaacggcccgctgttcgacggttatctggcggcgggctgccgggcggacgtggcgccgatgaatgcctatgaggcgccgaaaacgaacatcatgcactgcgacggatggccggcaggcagcgtcatgggcgcgcgagagccgtacatcaatatcaacacggagagcgagaaccgcgtcgcgaactggatcggggacagcgaccagcccgacttcaaattcaggacctaccagatcccggcctccagccacgactcgcggtacagcctgatcgactactatgccgggcaggggcaggcggactgcaaacgcatcggcatggagctcggctggcggggctgtgagggcgagccgctcgggaatcccttcgagctcgtgttcaacgctgcgttccgcaatctgtacgcttgggtgcgcggcggcgtccccgcgccgcatgcgccgcggatcgagacggaatacaccgatgcggcgcacgccgatacgcttggcgcgtggctgcgcaataagacggactgcttcggaaacgcgcttggcggcatccgcacgcccggcattgactgcccggccggcgtgtattcgagcgacagcaggacggcggacggcggctggcagcttttgttcgggcagttcgtgccgttcccggcggaaaagctgaagacgatgtacggctccgcgcagcagtacagggcgctggtggagcagcgggccgacgagatgatcgcgcagggcttcctcgtgccggaggaccgcgcggagatgatcgaggccaccgtgcagatcgcagtccgctgcggcctgtaggcccggcaaaggcggtgcgtccggcccgcagaaaaaacacaaggcaagggaaaaaacaggaaaatatatgaaagtcaacatcaaaacaatcagtaaaatgacgggcgtttccccggcaacggtgtcgaacgctttgaacaaccgcaagggggtcagccgggaaacggcggagcggattcaggccgtcgcgcgggaattcggctatttcgacggcgcgcggatcgagacgatcaacttcgtcatctataagcgggacggcaaaatcgtgaccgacacgccgttctttacagcgctgatcgcgggcgttgaggcggaggcgcgggccgctggctataaaacggtcatctgcaatttggattaccgggagccggatttcttcgcggtgcgcgaccagattctgaacgattcgagctcggcgatcctcctgctcgcgaccgagatgcaggaggaagacatcaagccgttttcgtcgtccctcgcgccgatcgtcgtgctggacagctggttcgaggacatgaccttcgattccgttttgatcagcaacacggattcggtttgcagcgccgtaagggggctgatcgcccgcgggcacaaaaaaatcggctacctgtgcggcagcacgcggatcaagaactttttctaccgcgaggagggctaccggcgggccatggccggcgcagggctggaggcggacccgaaattctgcttcccgctcacgcccgacatggagggcgcctatgcggacatgctgtttctgcttgaaaacggcatagaaatgccgaccgccttttttgccgacaacgacatggtcgccttgggggcgatgcgggcgtttcgggagtacggctacgctgtgccggacgatatttcggtcgtcggcttcgacgacctgccgttcggcgcggtgtcgtacccgccgctgagcacaattcaggtgccgaaggaggagatgggcagaaccgcggtgcgccggctgatcgagatcatccggaacccagcgggcgttaagatgaaaatacaggtctgcaatacatatatcgagcgcggcagcgtccgcaatctgaacgacggggaagcgggcggcgtgccggtgcagacggcggcggaccgcgctgagtgagccgctccgcggcaagccgtaaaaggtctagagagaaaggaagagacgacgatgaaaaaaacgatcaggctgggatacgcccccacgcggcgcagcatcttcagtgcgccggacgccgtaaagtacagaaatctcacggcggaccggctgcgggaaatgggcgtcgattttgtagacatcgacgacatcaatgccgaggggctgctgtacagcgaggacgaccggctgcgaatcctcgaaaaatttaaggccgagaaggtcgacggcctgctgctggcgcactgcaatttcggcacggagtacctctgcgcgcggctcgcgaaggagctcggcgtgccggtgctcttgtggggcccgctcgacgagcggccggagccgaacggcgtgcgcctgcgcgacacccagtgcggcctgtttgcgacgggcaaggtgctgcgccggttcggcgtgccctttacatacctgacgaactgccggctgagcgacccggtctttgagcggggcgtgcgcgatttcctcgcggtgtgcaacgtggttcggaccttccggcacattcggattttgcagatcgggccccggccgttcgatttctggtccacgatgtgcaacgagggcgagctgctcgagaaattcggcgtggagctcgcgccggtgccgctgccggagctgacggcggaggtcaggcgcgccatcgaagaaggggacgcggtgcgggagacgatcgcgtactgccgggagaatatggaaatccggatcacagacgagcagcttcaaaacgtggcggggcttgccgtcgcgatggagcgcctgatcgaaaaataccactgcaatgcgggcgccatccagtgctggaacgcgctgcaggatgagctgggcatcatgccctgcgcggcaaacgcacttttgaacgagaaggggatcccgattgtctgcgagacggacatccacggggccattacggcgctcatggcggaggctgcggcgatgggggagaaacgctccttctttgcggattggacgatccggcacccggacgtcgagaacggcgagcttttgcagcactgcgggccgtggccgatctccgtcgcgtcgtgtaagccgtgcatcacgtacccgctcgcgtttgactaccccggcgcaatcaccgccgaggcgaagcacggggacgtgacgctttgccgcttcgacggggacaacggggcatacagcctgctgctggggcgcgccaaaggaatcgacggccctaaaggcatggggacctatctctgggtcgaggtcgaaaacatcaagcggctcgaggcgaagctcgttgaggggccgtacatccaccactgtgtgggtatccacaaggacatcgtgccggtgctgtacgaggcctgcaagtatatcggcgtcacacccgatttgtacgacggcaacgaagaggagatcaaggcgtatctgaggggggagtaaaatgaatcttcaggcgaaatcgtttgccctgcgccgggatattctggacatggtgtaccgggccgggacggggcacatcggcggggatttcagcgtgtgcgacatcctgaacgtcctctataatgcggtgatggatattaccccggagaacttcccgtctcaggaccgcgaccactttatcctgagcaagggacattccgtggaggcgttgtacgcggtcctctgcgacaagggctttttcccgagggaggaccttttgaccgtctcgcagtttcgcagccggtacatcggccatccgaacaacaaggtcagcggcatcgagatgaattccggctcgctcgggcacgggctggctgtcggcgtgggcatggcgctcgccatgcagcgggacggcaaaaagcaccgcgtgtacgtcgtcatgggcgacggcgagctggcggagggctctgtctgggagggcgcgatggcggcgggccattacgggctctcgaacctctgcgcggtggtggaccggaacggcctgcagatctccggcacgacggaggcggtcatgcggcaggagagccagagcgaccgctggaaatcgttcggctggaacgtactttccgctgccggaaacgatacggcggcgctgaaggccgcatttgacgcggcgaagcagtgtacggacaagccgacggtcattctggccgagacggtcaagggctgcggcgtgtcctttatggaaaatcaggtgggctggcatcaccgcgttccgtctgagacggagtacgcggctgcggccgccgagctggaggaaaagagaaaggaggcggagcgctgtgaataaaattgcaaatcggcaggtgatctgtgacgttcttctggagcacgccgcgcaggaccgggatatcgtggttctgtgcagcgattcccgcggctccgcctcgctcgcgccgttcgcggagcggttcccggcacagtttgtggagatgggcatcgcggagcagagtcttgtttccacggcggcgggcatggcgcgggtcgggaaaaaagcgtttgcggcttcaccggcctgcttcctctccacgcggagcatggagcaggtgaaggtggacgtggcctattcccataccaacgtcaagctgatcggcatttccggcggcatcagctacggggcgctgggcatgacgcaccacagcgcgcaggatattgcggcgctggcctcgattccgggtatgcgggtgtatctgccgagcgaccggtacctgacccgcgcgctgatggaagcgctcttaaaggatgcggagccggcctatatccgcacggggcgcaaccctgtggaggatgtgtatgcggcggagacgctggatttcacgcttgaccgggcggtcactgtccgcgagggcggggatgtcacgctcattgcatgcggagaaatggtgcgccccgctgcggacgcagccgccctgctggaaaagcgggggatttccgcgcgggtgatcgatatgtactgcgtcaagccgctggaccgtgcggccgttctgaaggcggtggaggaaacgaaagccatcgtcacggtggaggagcacagcagaatcggcggcatgggggcgatggtcagccagatcgcggcggaggttggcggctgccgggtgaaaaatctggctttgccggatgaaccggccgttgcgggcggctcgaaggaggtgtttgcgtggtatgggctggatgcggcgcatatcgcggaaacggcggcggagttggttgccctatgagctatatcctgggaatcgaccagagcacgcagggcacaaaggccctgctgttcgatgaaaacggtgcgctgctcggccggcgcgaccggcggcacgcgcagaaaatcagccgggagggctgggtttcccacgacccgatggagatctaccgcggcacgatcgatgccgtgcgggcgctgctcgatcaaaccggcgttgacggcggcgccgtcgccgcggtcgggatcagcaaccagcgggagaccgcgctgctctgggaccgcgacaccggcctgcccgccgcggatgcggtcgtctggcagtgcagccgcgcggcggagctctgccggcgctttgaggacagcgccgggcagatcaagcagacgacggggctcaacctatccccgtatttcccggcggcaaagtgggcatggctgctcgaaaacacgccggggctttccggaaaaaggctgtgcgccggcacgatcgatagctggctcgtctataagctcaccggcgggaagcactttaaaaccgattattcaaacgcctcccgcacgcagctcttcgacattacggcgctgcggtgggatgcggcgctgtgcggcatgttcggcgtggcggaggaaatgctgcccgaggtctgcccgagcgattccgttttcggggagaccgattttgagggcatactgccgcacccggtgccgatctgcggcgtgctcggcgattcgcacggcgcactgttcgggcaggggtgcctaaagcccggcatgacaaaggccacctacggaacgggctcctcggtgatgatgaacatcgggaaaaagcccgtgttcagcgataaaggcgtcgtgacttcgctcgcgtggggcatgggcggcgaggtcgcctatgtgttcgagggcaatatcaattacaccggcgccgtcacccgctgggtggtggatgacctgcatctgctcgattccgccgcagaggcgggcgccgttgcggcggaggccgacccggaggacggcacgtatctggtgccggcgttcaccgggctcggtgcgccgtactggaagcctgaggcgcgggccgcgttctgcggcatgtcccgcaccacgggccgggcggagctggtgaaagctgcggaggagtgcatcgcctaccaaatcgcggacgtcgtccgggcgatggaggcggattccggcgtgcagatcggcgagctgcgcggggatggcggccccacgcgggacaaatatctgatgcagtttcagagcgacattctgaacatcccggtcgcggtgccgcagcacgaggagctttccggcatcggcgcggcatactgcgcaggcattgccgccggcgtttacagcaaagcggtgctggcgcgcgcagagcgctcggcgttcgtgccgctgaaaggcggcgcatggcgggagagccggtatcagggctggaaaaacgcagtcggcaggctgctgtgatattttgaaaagtgagaggagacggaatcatgcagacggttgaaaaatggggcgtctttgaagcggcggttcgcggcccgcagggcggtaacccctttacggagcagtttttcagcgccgtgttccgcggcaagtgggagacggtcgaggttgacggcttttacgacggcgacggcatttacaaggtgcgctttatgccgtccttcgagggcgcgtatacgtacgagacgcgcgggagtttccccgaggccgccggccgcggggaattcacggtgacggcgcccggcgcgggcaaccacggcccgatgcgcgtcgtgaaccagtaccatttcgcctacgaggacggcacgccgtactactcggtgggcacgacctgctatgtctggtgccaccagccggaggacatccggcaaaagacactcgaggagctcgacaagggatatttcaataagatgcgcttctgcgtgttcccgaagcattacatccacaatttcaaagaccccgaaaccttcccgtacgagggcaccccggtggacaacagcggcctgaatgaggagaccttctcaccggccgtcgatttctcgggcaatgactgggatttcacccgcttcaacccggtgcatttccggcgcgtggagcaggcgatccgggagctaggcgaccgcggaatcgaggcggatatcattgtcatgcacccgtacgaccgctggggcttctcacagatgacgaaggcgcaggacgacctgtactggaattatgtgatcgcccgcttcgccgcgtaccgcaatgtttggtggagcctcgcaaacgaatacgacctgatgggggccaaaacgctggaggactgggagcggtacgccgcgatcctctgcgaaaaggacccgtacaaccacctgcgctcgatccacaactgcattgcgttttacgaccacagccgcccgtggatcacgcattgcagcctgcaaaggcaggatttgtaccgccatgtcgaatacacggaggattaccgcgtgcgctacggcaagccggtggtctgggacgagatcgcctacgagggcaacatcgatatgggctggggcaacatctccgggcaggagctgacccgccggttctgggaggcctcgctccgcggcggctacgcggggcacggcgagacgtatctcgaccccgaagacgacatcctctggtggagccatggcggcccgctgcacggcgatagtcccgcgcgcatccggttcctgcacggcattctggcggaaacgccgggccgcggcttaaagctcgccgccggcatgttcgatgaaaccgtggccgtgccggacgccgtgtccttcgggcaaggcgccgggtatgagatccactactacggcttcggccggccgtcgttccgcgatttccgcaagcccgagggcgagcggtggaaggcggaggtcatcgacacgtggaacatgacggtcgaggacgccggcgtccacaccggccggttccgcatttcgcttcccggccgcgagtatatcgccgttcggctgacgcgggtagaggcgtaagcgggatatttcaaaaggatcgactgatctggaaacagaagaataaaagccgaaggctgcctgtatcacacaggcggccttcatttttttgcatggtttaaagccgttggcctaaaatgttaaggtgtagatgaatggattaaaaaaacttttcaataaacataaaaaaggagaaaataattttcgaaaaatacttgaaatttattttcccatatggtataaaataataaacaaaagttttaaacaaggcggatgacagatgcatcttcaccgtttgggagggaagctggaatgaaagtttttttgaaaaaggcgtggaagcgaggtatacggaactggcagctctatctcatgtttcttcccgtgtttctctatttccttatttttcactattttccgatgtacggcatccaaatcgcttttaaagacttttccggcgcgctcggaatctgggaaagcccttgggttgggatggcgcactttgaacgttttttcaacagcagcaattttggggagacgatttacaataccattacaatcagcctttacacgctcgtagtgagctttccggccccgattttgcttgcgctgatgctcaatgaggtaaaaagcagatttttcaagaaaacagttcaaaccatcacgtatgcgccttattttatttcggttgtggtgctggccggtatggttattctgtttctgtcgccgcagtccggtctgttcaatcaggttcgcagggcgctgggctgggaatcggtcaactatatgtacgagggcaaatattttaagacgatctatgttctttcgggcgtttggcagaacaccggctggggatccatcatttatttatccgcgctggcggggatcgatccggcactgcatgaggctgcggtgattgacggtgcctctaggctgaaaaggatctggcacatcaatcttccgggtattctgccgactgtgtgcatcatgctgattatgaattgcggctctctcatgaatgtgggttttgaaaaagtatttttgctgatgaatgatataaatcgctccgcagctgaagtgatttccacctacgtatacaaagtagggcttcagcaaagccagtattcgttttctacggctatcgggctgtttaattccctgatcaattttattctgctgattacggtgaataccgtggtcaaaaggatggatcaaaccgcgctgttctgaggagggctgctgtgatgaacggaacaaaaatcaagcgtgcaaaaggcgatctcgtgtttgacacaatcaatacgctgctgcttgtactggtgatgctggtcgttttatacccgctttactttattgtgatcgcgtcgttcagcgatccactggaggtgctttccgggcatgttgtcttttttccgaaaaaggtgagtctggaagcgtataaaatggtatttcgggatgcgcagatcctgacaggctatcgaaatacaattttctatacgctgctcggtacagccgtcaacatcgttttgacggttcttgcggcttatccgctctcccgcagggatttggcgggcagaaaattcttcaccgtgatgctggcggtcactatgtttttcagcggcgggctcatccccacgtatttgatggtatccaacacgctgcatttgctcgatacgatctgggcgatgattttgccgggggcaatttccgtgtggaatgtcattattgtacgcacttattttcagacaagcatcccgccggagctttccgaggccgcgatggtggatgggtgcagcgatttcatgctgcttgcgaaggtgattcttcccctatctatgcctgttttggcggtgatggtgctcttctacggtgtggcgcattggaacagctttttcaacgcgctgatttatctcaacgataaggcgctctatccgctgcagctgattctgcgctccattttggtgcagaacaccatgtcggaggatatgctggccgaggtggattcgctcgcgaatcgtcaggtcatggcggaaacaattaaatatgctctgatcgtcgtggcttctgcgccgatcattgccgtgtatcccttcctgcaaaagtatttcgtaaagggaatcatggtcggagcgatcaaggggtaagggaggggaaagcaagaagagaaagcattcggatgcggaagaagtgagagaataaaggaggattaccgtgaaaaacaccttaaaaaaagtattggcagcaattttgacccttgcaatggcaaccggcaccgcagcctgcacaagcgcggaagaaagctctaagccggaagcgggagacgcgccggattccggcgtgatcgagctcacaggctttgcggtagaggggccttacacgaagggcgatttcaacgacttgcccatctgggattatgcggaggaggccaccggcgtccgcgtggattttgaaacggcgcccgccgcttcgtttcaggagaagctgaacttgaaatttgcttcgaaccagcttccggatgtatttttcaagtgcaatcttcagcctgcggacatcaccaaatacgccgccgaggggacgttggttgccatcgacgggtatcttggggaatatgcgccgaatttttcgtcgtatatggagaatgacgcgtctatcgagaaggaaattcgcatggcggacgggaaggtatacggctttccctatctggtcaccgcatcaccgtccagaattttcccgaaaatgtttgtcaaccagaaatggatggaggcgcagaatctggaaatgccggagacgaccgaggatttctatcagcttttgaaaacgatggcgggctacgactacaacggaaacggagaagcggatgagattccctttgcgccggaggggctttccgccctgacaaagggcctgctcgggtcgttcggccttttgacccgcggtgcggcgcaggaggagtgggatattgacccggagaccggtgcgctgcggttcatcaaaacatcggatgaatacaaggcgtttctcgagtattgcaacaggctgtacgaagaaaaactgctggatcaagagctttttacaacggatattccgaagctgacggccaaggcgcagcagaacattctgggtgttgtgttcacgaacaatacgaactatctgggcgattatgcagaggatttcacgtatattccagcgcctctgatagggcccgagggcgaccagctctttggcggcagaaccattccggtggccggacagaacacttttattacaaagatcaacgagcatccggaagagacagtgaaatgggtggactatttttactcccccgaaggaatcgagcatttctttatgggtgtggagggcgatacctatgagatcgatgaaaacggtctcccgcagttcaccgataaggttatgaataatcccgacggcatgaatatggaggaggttttgggagattatgtctgctggagcggcggcggaaacccctctgtggcggatgacacgcatttcgggaatttcctgattccggaaaccacggtggaagcggcgcaggcactgaaagcatatacgccggaggaaatttggggtgttttcaactatgcggcggaggattcgagccgtatatccgtgctgacaacagatatttccacctacttggccgatatgacagccaaattcattaccggtgaggccggcttcgatcagtgggaagcgtacaaggaaaacgttgaaaaaatggggctggaggagtaccgggagatcgttcagagaacggtggaccgctatgaagaaaacgactgatctgttttctagaaagggagaaaggattgcatatgcgttatcaaagcaggtatcacctgtctaacggtttgctgtcgctggctttggacagcctcaccggcgagcttttggagcttgtccacgaggaaaccggggaaaacctgatcaaaaaccacacctacgcactgccgcagccttttgcggttgtgacaaaagacagggcgcacggcctgcgtcccggcgacgcgcaggccattgcagagtatccgaggctgcggcctgaaatagagcttcttccttccgctatgggggctgcggtaacttaccgtgccctgtgggacggagagcgtccgtgggatgtggcggtgcggtatacggtagagcttctgccggggaagctggaaagccgctggaatatcacggttcagaatcacgccgtagagcagctggaggaagtgcgctttccctgtatcaacggggtgtatttcggaaaaacatgggaggacgatacgctggtgtatccgttcgtttcgggcgtcaaggttgaaaatccggtatccacgtttttcaaaaaagcgccgaagatctgctggaggtggcagaattaccgctatgtctatgcgttggaaaatatggcgaggcaatttgagggggatacgtttggcatcgaggaaagccactcgggcaatctttcgatgaagtggctggattactacggctccgggcaaggcctgtacttcggctgtcacgatccgcttccgcatatttgctcgctgcgggccgatacgctcggcccggcctgtccgggcatgaacttctcctttgggcatccgatctgtctgaaaagcgaggaaaagtggagctcgcctgcgtttgtgctcgcgctgcatgcaggcgactggcatgcaggcgccgagcgctacagggaattccggcgcacgtcgtctcccgcgtcaaccgcctgcccgaactggtttcaaaaaagccccggattggtggcacactacgactttaaatatcagaatggcggcgttgtccaccggttcaatgaaattgaggggctgcttgaggaagcggaagcgctggggcttaaccatctccttctcgcgggctggcacaaggatggctttgacaacggcttcccggaatatgagccggatcctgagctgggcacagaggaggagctgcgaacacaggtgcagcgtgtgactgcacgcgggggccacatctgcttttacgtcaattcccggctggccaacacaaaatacagccacctcaagaagtttattgcggaaaacagcgtgctgcggcaggatggctcaatctttacggagcagtacggaacggatgacctgcgctttgccgtgcagtgccccggaagcgcaggatggatgaaaaagctggaggataccgcagcctatgtgaccggggaaattggaatagacggcatgtatctcgaccagctggcaatgggctccccttgcgtctgtcacaatccaaagcacaggcatggctttggggagtggaatacatggtatcagaaaattctggaagccattgcccggaatcgggcgcaggcgggaaaggcaccgctctccataattcacgagggcgtttcggatgcgtatggaccgctggtttccgggcagcttgtgtccaccttttcctaccatcattgcggggcgtttccgcagctttaccggtatacgtttccggagcagattttggttgatatgctttatcccgaaaaaaatctggcgatgcgtcccgtgcatgtcgcgatggcatccagagagatcatggaccgcgctttccttttgggcatgtattattgggtttatgatctggcggaggacaacactttcagccgagacccaaaacagtacgcctatcttaagaatatgatcgatctgcgcaggttctggctgaagcaattcgggcaggggcgttacgtggatcaagatcggatactgaaggtgggaaacggcgtgcaggccgcctgctatgtgctggatgacagcctgttggttgccgcctgctgcgatccagcgcttcgagaggcggagattcaggtgcgggctccggagggatgccgagccacagtgtatacggcgcagagcatcccgggcggtattccgactcgaatcgttcaaggtgaagaaaatagtgcggcgctgcggttttccggtgcgccgcaggtgctgctccacataacgggccggttttaaaaccctttcacgggaggacttcaaatggattatgcagagctggtcaccgagaaggtgaacccgaacacagtcgatattgataccggcagcacagaggaaattctgaggatgatgcacgaagaggactgcaaggtggcagctgcggtgggcgaggtgctcccacagatagcggcggcagtcgatatgatcgcggagcgcttggcgaacggcggaaggctcatctatgttggagccggtaccagcgggcggctgggcgttttggatgcttcggagtgtccgccgacctttggtacagcaccggaacaggtcgtcggcgtcattgccggcggcgatcaggcgctgcgcacctccatcgaaggggcggaggactgccgcgatctgggtgcggcagatgtggaccggctgcaggtctgccggcgggatgttcttgtgggaatcagcgccagcggaaacgcgccttatgttctcggtgcagtggaacgggcggcaaggctcggcgccgctacggtggcgctgtgcaacacgcaggccggtacggtgctccaagctgccgatgtggcggttgtgccggtagtcggaccggaggtcatcatgggcagcacacgcctgaaggcgggtacagcgcagaaaatggtgctgaatatgttatccacagcttccatgattaagctgggaaaggtttaccgaaatttaatggtcgatctttccccgagcaatcaaaagctgagagaccgctcagtacggattatcatgcaagcagccggcgttgagcggaaaacagccgatgaagcgctgaaaaatgccggcggggaaacaaaggcggctattctgagcctgctctgcagctgctctccggaggaggccaagcggcttctgcaggaggaacggtgccttgcaaaggcagaaaagctgtacaggtgcaaaagcgggcgccccgggaaggcggggtgagccggcgatggaatatgtaatcggtattgatggtggcggtacaaaagcgcatctgcttgctgcggacagacatatgaatgctttctgtgagctgatggggaaaagcaccaatctgacaagtaatcccccgcagctggtggaggaaaacctgctgcggctgctggctgagtttttcgcacagacagggtgctgtcccggggattgccggggtgtgtatctcggttcggcgggggccgggcgcgcctcggcagaaaataccctgctcgcgatgctccgcagagctggcttcgaaaaaaatgtgacggtcggcagcgacgctgcgggcgcgctggccggtgggcttcgctctggctttggcctgcttctgatcgcgggaacggggtcgatctgctacggcagagggccatccggcgaaatctgccgagcgggcggctgggggcatatccttggagacgagggaagcgggtacgacgcggcctgccgcattctccgcgctgtagcaagggcgcgggacggcaggggaagcgccacaattttggacgaaatggtgatggaatactggtccttagacggcatggatgccctgatggactgcgtgtaccgctcaggaaaaggaaaaactgaaattgcagcacttgcaattttgctcgatttggcgtataaagaaggggatacagttgcagccgggattatggaggactgtgcgcagggactggcagagctggttgctgccgctgcacggagttttcagaagctgtatggagagggcggggcgattccctgcgcctgctccggcggaatgctggaaaaatccgcctatcttcgggcatgcctgcgggaaattctggcggaaaggcttccgcatgtttcccttgttctaccagagcacagcgcggcttgggggtgtgcaagtctagcgtgggcgtcgtcaaaaagttaagaatgaaatttaggaggagcctatggcagaaatatttgcaaagctgaatcagatgatcgaggattttccgccgtcggagcaaaaggtcgggcggtacattctggatccatccaacaatgtcatgggcctctctgtggagcagctgtccaataatagcggtgccagcaaagcggcggttatccggttctgcaaaacattgggctataaagggtatcgtgattttgcccttcagctcacaacggagctggctatggataacaaagatggtgcgctggaaacgtataaagatatcaatgtgggcgatgacgtggaaaccattgtgcgcaatgtatcctatcacaacgctaaggccatcgaggattcgcttatgctgacggatgtggcgcttgtgcagcgagcggccgatctgctgtaccgcgcgcagcacatagatttttatggtatgggggcgtccggcatcgtggcggaggattccatgtacaagttcatgcgcatcaataagtacaccacagcctacggtgatccgcatcttcagctgacctctgcggcaaatctcgggaaaaacgatgtggctgtggcgatttcgtggtcgggagagacgaaagatacgctgatggcggcgaggctcgccaaggaaagtggagcggctgtgatttctatcacccgttacgggaatacgtcgctggaaagtttttcggacattcacttcgggctgagcgcgccggaagcgaccatacgctgtggagcgaccagctcccgcatggcgcagctgaacatggtggacatgctgttttattgcattgtcagccagcattacggggagcttcaaaagtttttggatcgctcccgtcaggttgtgaaaagcaagagaaaagggtcgtgaggaatgcccctgtttatatgcggatatcgcccagttgcaatgagatgcccccttgatgcagaaaagcaatgctctgcttcaagggggcattttgcctaggcctccctcttgctgggcgctcacttctgcgcctttcccatatggctccggtactgctccggcgtgacgccatagatctttcggaaggactggatgtagtgggatacatcgttgtagcccacatgggcggcaatatcactgaccttgaagatagttttttccaaaagctcgcgggatttttccagccgatattcaatcagatgttttgagaaggttttgcagcacttcgccttgaaaagccggcaaggaacggtaatatttctgaacttttgctaggtgttggctccatcgatagtggcggcttcatacagatccgccggaacgctttgcagaccggccagcaggagcacggtaggcgttgcgcagccctgtaaaatgttggattgaagctgagacagcgtccatgtgtccttgtcagggaacatgaatgcgacctcactcttgcttttaatatcttcggcaatggcgatcagctcgtcccacatcgtgggactttcatatccggcggcctcaaacttatcaacgtcgtagaatacgcccatgaagttgcaggagaagggcaggcagcagtagtggccgtcctcgaatttcacggcgtccagatagttggacatcacgttgtccatgcagccgaccttgtccagcgcccgcagacggccctgctgcgcaaactggatgaactgcgaatcggtgggctaatgcatcatgacgtcgggaatatcattggttgcggcgcgggtcatcaggacggtcgctgcatcgggcaccacgttctgcgtgactacgataccgggattttcctcttggaacgcctcgaccgcagcgtttaaggagtccatgacctcccgcttttgctggaaaaactcgatctcaacggttgtgccggcagcttccggcgcggattccccgctactggaggtgcttccatcagccgtactgcctgcggagccggtatccccgccgcagccggcaatcatgctggccagcatggcggcggcaagagaaacgaccaaaagcctttttttcataacaacaacatcctttctttgttgagtgttatcccgagatgtttgactatttgcacaatcaatctcggcttatccgtgtataattatagaaactttttcaaagatttggtataagatttattgcgtttcccatatagcaaaactggtttttgtgtattgtgtccgaatggggggttaaatacgtttgattttggtgctttttaaagtttaacttatcggcattccgcccacaaaataccgtcctttttctcagaggagaggcagggcgctgccgttgagcagaacgcgggagacaggctcgcggcagtagagcttcaccgcgcggaccggtattacggccccagagagtatgaagctgccattgatagctccgtccagtggtatcagccggagtattgggcctaccgggaaagaagattacaacaacaggaaaagaaacagctatccttttatcgtcaggagctggaacggtgaagaattttgagttgaaaggagggagccatggcaagtaaattccagaccatcacggaactgcatgggagcacagcgaaagcagtgaccgccaccccgtctagctggagggcgttttttcaccactttccgagcggggtgccttatcctccggggacactgtccagcagttccctgtctttttcgttcagcttcagtagcttggtcagctccgccaagcgttggggtttctcccgcggcttctgcccccagccaagggcttttccgctttcgtcttggcaacaggcactctgttgctcaaacgtaattgcttcagttccaaataactttctgagtttattcagcttgtcaagctgttgtttgtttagctgtacggtctgcaaaattgctgaaatagtattttttgcgttgcgtgaatcagcctgtgaatccgttcatgcagaatgatcagattggtgtacaagcggccgtccttcatgctctccggtaccagcccaaagaagttgccaatgccgcaggaaggccccaagatgttacccgtgcggaatcccatgttttccaccgtctggtaaatagccttgatgacaatgggagaagtgtggtgggcatttagggtggtggctttggtggcatctattccctgaaggacaacaggctcttcagtcctgcgaatttcttcgcccactgtggattgtcccccgtcagacgcttagggcaagccgccccagcccacataccgggacaaggtttcctgttcctccggagtggccaactttccttccggctcgattttctgcaaggtttggatggccgctgcattgttgtggaattttgtcttggccccaccctcgcccagatggtcatctgtaatgcggaagttgtggcgctgtaccgggggaatttccgggtgcagggtcgtaaaggtaatacgctcacggcgggggtgctttggcggcagtggaagtgattcttcttttttaggctgttcctgctccatgccggtcatttggttttcatggcgatcaatatcctccatggtgagccattccggtttttccggcagggcggcatagagttcccacattttggcaatttactcgtccatattccctgcccgcaggtgtttttccgcccgtccgccagcatccagaaagtaatcgcaatcggtttttaagcggcttagcagacagtaactttcttctgcaagctcttctttttggggaggttcctacaccttgggcggcgcggtgaacaccggcgcattttgggataatttataagcatatcgaaattatccacataaaaagaggggattatccaaagattttcttctaaaattcggtatactaataccatcaaaaagaaaagggattgcgtctgccggattaggctggcagagcatccacgcaaaatctacggatggaggagagaataggcatgaaacagcggaagtttattctggttggagccggtggcttcggagaattctgggaagaaatctttattcccaagatgaaggactttgccgttcctgtagcggcggtggatgtttcggaggaagttttgaagctccccgtaaaacacggcactgttccggcagagaaatgctatactgatccccgcaaggctattgaggaaaacccctgcgactttttggtgctggtgattccgcctcaggtacggatgcagtacatcgatctggccgttgaatacgggctggatgtggtttgtgaaaaacctctagccgacaccatggaacatgcctgcgaaatttatgtgaaaatgcgggatgcaggactcaaggtttcggttacggtaagtcatcggatggagcagagcaaacagtctttgaaccggattttggacagcggcaaatatgggcccatcaactatcttgtgggaaggctgactatgacccgcaaatatgatcaggggaaaaagtggtttgacaaaccgatcgatcagctcatccgtggcaacatttcgggcggcctgatccacgagctggacacgttccgcgggctgtcccgttccaatgccaaaaaggtctacgcaaagatgtggaaatttaatccatcggacaatagcgctggccccagcgcctttgctctggtagagatggaaaacggcgtccagtgcgtgctggaacattcccatgccaacgcaacggagcttaacggctgggcgcacgagttctaccgcgcggaatgtgcttacggcacggtggtggtggacaaggaaaagcttaccgccagttgtgatttgggacatccttatcccacctactccgagattcctctggctcagcaggacttctgggatcatgccttgattgtccgagatttttgccattggctggacggtggcaatgaacccgaaacctgtatccgggacaacatgtactgctgcgctctgacttttgcagccatagaaagcgccctcaccggcagggaggtggatgtccccgcatttctggaccgttacgcgaaggaatatggaatcaatctggaagaagattaaggaggagtaactgtgcagcgctctgaatctgtcgtcccgccggcaactgccggagtaaggaacaagagcaagggcttatggcagaaaataaaggctcataagaccctttacctctttctgatgcccgccgttctgctggtgctggtttttaactatgtccctatggtgggcctaattatggcatttcaggattatcgagccaatctgggctggtttggcagtgaatttgtgggtctgacccattttgtagagttcctacaggatcccactttttggacggtgctaaaaaataccctgattatctcgattgcattgatgattttttcattcccagcccctattctgctggccatttgtctcgacaacattccaaggcagggattcaagcgagcggcgcaaaccatctcttatttaccgcattttatctcctgggtggttatggcaggcttagtctaccgactgctggacacggatactggaatcgttaactacatcatccgttctctgggctgcgaccccattccctttatgcgcacgccgagcatgtttttgcccattgtcattattgtggacattttaaaggaggtgggatggaactccatcatttttctggcggccatcacaaatatcgactcatctctgtatgaggcagctcgtatcgacggtgccggaaagctcaaatgcatctggtatatcacgctgccgggcatcggccccaccatcggcaccatgctcatcctccgggtcggcagcatggtcaatgtcaattttgatatgatcttcaaccttaaaaaccccatgatcgacagtgtggccaacgttttgggaaccttcgtttacgagcagggcatcctctggggaaagttctcctacgctaccgctgtgggtatggttcagggcctgatttcggttattctggttttcatcaccatgaaggctgccaacaaagtctcgggcgaatcctatatcgtctgaccggaaagaaaggaggatttttatggctattcagcgctccagagcggagagaatcggcaatggagtgttctacattctgcttgtcctgctctgtatcgtcacgctttaccccttctattacgtcctctgctattcggtcagcgaaggcgctgaggcggccgctaaggtggtcactgtatatccccgaggctttactatggacaattacgatgcggtttttcgggataaaaacctgggcagcgcctttatagtttcagtgctgcggaccgtcatcggcaccgtgggcaccctcattgtcaccagcatcgcggcttatgctctgtctcgaaaaaatctccctggcaagaagtggatcatgtggttctttatgattaccatgtactttaacgccggcaccctgcccaatttcgtggtgatgagcaagctgggacttttggacaatttcgcggtctatattctgcccatgctcttcagcacctactacatgatcatcataaagtccttttttgagcagattcccactgcgctgattgaatccgctgtgctggacggtgcttcggagttcgtcatctttaccagaatcgtcctccctaccagcaccgccgtcatcgccaccatcgcactatttgctggcgtggcccaatggaatgcttacttcgacggtatcctttatgtctctaatgagaagctgcagcctctgcagactttgatgtacaagatcctcaaaagcgagcaggctttcagcctttcccaaattgccaacgccgctgagggcgcgaccagaattacggctgaaggtgttaagatgtctatgctgatcatctctacagttcccattctctgtgtttatccgttcctgcagaaatactttgtcaagggtattatgctgggggcggttaagggctaaaaacttactaaatcaaaggaggattacatatgaaaaaagcactctctgttatactgctggcagtcatgctgctgaccggttctctcacaggctgtggtcaagataccggcacttctggcaacggaagcgatagcagcgggtcagccatcgcttccgaaacggctgacaatagtgatttggaatggctgacctacacgtttgtggatgtccgcaactcaatccaacctgatggcgaaagcgatttggactgcatcaccccgtatttggaggagaagttccacatcaaggcggaacgggtgacttttggtgagggtgaaccggttcagcagcggctgaacatgatgattgcggccggtaccttgcctgatgtgatcaatatttccagtccggatcttccctggctggtcggtatggatgtgctgcagcctctggacgactatttgcagtatgtgcctactatgacaaaatggattaacgagctgggctggaagatgatgagtgtggatggccagacttacggcctgcccaactatggcatccccaacacggatgatgcggacgtccagaccctgatcgatgagagcgacaaattttatcagccctattcctccgcacctctaaagatcaacgagaaaattttggagcaagccggctaccgtttcaccaagctttctgatattcaagcggcttgcacggccgagggcagggctcccacctgggaagattttgcccttgacccgccggtggagacctttgaagattttgaaaaacttctgtacaccatccatgacaccgtcaaaactgaatccggtgtggaagtgacgcctctaacgatcaacgactgggcaattctccatatccagaacctctttggtcccgcctctcaatggtggcgtaatccggagacgggagaggtttccggctatctggatctgccttgggccaaggacacttacaaaactctggtcaagtggattcacgatggtattctggatcccgattatctggttcagaagcaggagcagatacaagaaaaagtggcttccgggcgcgttgccatctattactcggttcccaacaatctggcttgccgtgaagccatgactgccgccaaccccggttatgatttccgtcctatgcgttggcctaccaccgcttacggggacaccgtcaattatcagggccacgcagtggacggcatctatcccgctggctacggaaacatggtcatcaacaaagattttgaggagccccagcgtctgttggagtactttgaatacctgtggagtgaggaatttctggaattgcagacttggggcaccgaagaagccggtctttacgagattatagacggcaagaaacagtttaaggatgaggccctttacgagtctatccgtaccggcaccaaaaccgatgacggcatctctgcctctacctatggtatctacgaccccaacaattattataagtatactgctcaggcgctccttatggcccccatgcaccccttcaactacaaggatgcccggggcaattacgacctgaatgtggacgcttacaactattttgaaaagatggcgggttccgagagcgttgtttctgatggttccgttctctccgccggttacgatgatttgaccaatactcccagcaacttctttgcctacgagtttagaagcaagggcatggccgaactgattgcgacaaattccgatgaggagttcgatgctgtttgggataagtggtacgatgccttcctgaccgagggcaaatacacggaggtcaaacctctgatggaagagtactacgagagcctgctgtcctaagcccgtgttgatctgaagactcactttatctaaagcgtttgtatttgtttcccgctgtcgggctgccttaccggcggcgggaacattgctttaacccagagcgccttttgtttctggatgggttttattgaccaaaatattttaataaataatccatattatattttaacttgacaagtaaaagctgataatttatagtaaggagagatattttatggcgaaaattcgtgtgactgtttggagcgaaggcttggatcctgtcaacgaacccaaggccgtagcggtttatccagatgatatcaacacggtaatcggcggtttccttgcggaaaacgaggatatggaaatcaccctgcataacatccgtgagccggaaaatggcctgactcaggagaccatagacaacaccaatgtactggtctggtggggacatatgtatcacgatgaggtctccgataaggtggcggcccgggtggcggaggcggtgctaaatggtatggggctgctgctgctccactccagtatgggcgccaagccggccagagtgctgttgggaaagtgcagcaacaccgggaagtaccgggaaatcggcgaacgggagcgcgtctgggttgtggatcgcagccatccagtggtggcgggcctggagaaggagtacattgaggtggaaaagaccgagatgtatggcgagccctatggcatccccaacccggacaacaccgtttttatcagctggtttgaagggggagaagttctccgcagcggtgtcagctggcacagaggggcaggtaagattttctttttcgcccccggtcacgaggaatatcccatctattacgatggagagattcaaaaggtcattcgcaactgcgtgcgatggctgtgccccattaacagccctaagacttccttccacgggtgcctcaatcaggtaacaccgctaagccccatcaatctgagcgggaaggaataagcgccttttgattgatccgccggaggttcccggccggaacttccggcgggcggttgaaagggtgaaccatatgaaaaagaaaacccggggaaagacgattcaacgagagctgttttggtcctattcggccttgatcatccttgtgctgacgctctgcattggcaccttctttgcggtatttttgacgcaaattgcccgcagaatggaggagtacaacctcagcctttgctaccggctggcaatgcagctgaacgatgaggtggagcggatggacgaggtggctcagcggatcatcttttcccccgaggtgaaggagctgttctgccagaagttttcttcagagcaggacgaagaactctatgacaatgagttagagctggcagaactgctcagtacctttataggccccacctaccgcctggccagaatcaacctcttttccgatggcgttcgctacctttcggtaaagggatacgcttctgtgcaggagctgccgcctcaggaaatcagctggacgcccaaagcctatgcaggcaaccggattttgctgtctccttccatgaaaggagatggtttcactacattttccctgattcgggatttggcgctgcctgcctactttcaggagaacggttatgtggaaattcagcagaactatgctgtgttcagcagcatcattgacaacactcaggcggggtttacggcgtttgaaaatatgaagaaccgtccctcggtctatgtctttacagctcagggtgatttggtttatccatacggcggcggagatcaggcggagtattgtctgggtttaacgcgggaaatggcggaaaatcccgacatggcccccagccgcctgcggatagagccgggccatttggaattgtactcctgtgtgaaaatgcaaaacacagattggtatgtcgtcatggtggacggtcagagttttttagaccgttccatcaccttttacgtctttgggattcttattggcggcgcgctgatgctgcttttggcccttgtgatctcctactggatttccagacggatcacgaagcctatttctcaggtgcaccggcagatccagtcaatgaatcccgtgactttggtaacgacagcgccggagcttagcggagaaaatttcaacgagatccagcagctgaactttgccttcaagaatctttgtgatgaactgggcaagtctgccgacgaagcagccacgacccgtgcctacctgcttcaggccaagctgcaggctctgcagtctcagatgaatccccactttttgtacaacaccctttcggccattggaattatggcagaggaagagggggccatgcagtctatggacatgattcttgctctttccgatatgctcaattacgtttctggcggggatatgtcgccggtggaactgcgcacagaggtggagtatacccagaactttctctctctgctgaaaataaggtttgaagatcaggttatggtgagtatcagcatccccgatcccctaatggaaatccgggtccccaaattgattttggagccgctggtagaaaattggtctaagtatgggatgagcggaacagggcaatcccggctttctattaaaggtgccgtttcaggcggcaggtggtccattacggtaaccgacaacggcccgggtttttctcaggagattatggaggaactgacgagcaagatggacggtgttgtgcgggaagggaaaatcccggatctgcacattcacaaaatggggctattgaacatttttatacggctgcactatgcctatggcaaggagtgtatctttcaggtggagaacaccccgcagggtagcggacaggtgacgattggagggtcttatcatgtcgatgaatccgctcattgagtcgttggtggtggaagacgaggcgcttatgcgccggacggtgatcaaaaggctggaagcctctccggtaggatttcaggtagtcggcgaagccaaaaacggtcgggaagcgctgaaactgatccggcttttgcagcccaaggtggtttttagcgacgtttatatgccggtcatggacggtctggaactggcccggattctgcaaatggaatttcctgagatcagggtggtaatcatcagcggccatcgagattttgagtatgcgcagaaggccatccgctatggggtagtcaattatctgattaaaccgctggaaccgaaggctctggacgaagtgcttacctctctgcgggaggggatcctccgggagcaatccaatctggtccgccgggacattgaggagatgctgagcggcggagcaggaaggggtgcaggccgaagattcggcttttttctggcctctctggggtattctctttctgctccaaccgtagaggcatccatgcgcttaaaggggctgtggagccaggtgctggggcagctgccggaggacccagactggtatgttttcaacgggtccagaacaggagaaatgtattttctttgtgaactgtccggtgtgaacactgagacacggatggaaaggctggcaaaacagcttttcgaaagccttctgtcactgtcagacggccatcccgtcaacctttgcgcgccccatggaggggtgacggaggaaaacctctttcccgttcggcaacagtgtagccggcttttgctggagcaacagaggattgggccgggggcgattttctggctgcaggagagttcggaggaaaccggcagccacgatacactgctgaccatgcagcagatgaatgttatcaaaactttggccagctaccgcaacggtacagcgctctgccgggaactggaaaaactgctgaccgaatgggatgccatgggatgccggcagagcgcctttgaaaacacactgggttctgtgctctggatgattgccaacagtctgtccggctgctcggagcaaaaggtgtggcacgccaagagtaccatattttcccatttggccctctccgcccggcttgtcgacgtgattcccacagttgagagtgctgtgaaggatatgatgctctcggaagatgctgttgccggcgatagtagcaatctgggacagatgattgaaacatatattcaggatcactttaccgagcagttcagcatggataccctggccagtcacttcggttttaatttgtcctatttgacccgcatctttaaaaattacaagcaggaatccccgctgaaatacttgatctcgttgcgaatgaaccgcgctatggagctgatgcgtcagtacccggagatggatatcaagagtattggggaagcggtggggtatgacgaccagcattatttcagccgagtattcaaaaatgccatggggatgagccctataaaatatcgagaggcgttaaccaagggggaagagatcaccgccagctccgccgttggactggaagtgctgttcccggccggaacttcgccggatcatattccgtaatggttagggggcccgcttatggatgggggaatgcttctaacacaagcgggcctgcctatttacagttaggagtacaactatgcaaaaaaacgattccagaatggtttatgcctacttttccatcctttactttttgaatatgtcctcccgggcgctgtttacccccttttttacggtgtaccttcaggaaaaggggctggacgtttcagagattggaaccgtcatgtcgataaattcgattatcatcattctctctcagccattttgggggatgattgcggatcgggtcggatcttccagaaaagtgctggcctgctgcttcctctttcaggcggcggtagtgttcagctttaatctggttcacaccgccctgctggtggcggcgactttcttcctgagcacgttctgttcctcgccggagggcccgctgatggacacatgggtgttgggaaacatgaaagcctccggcaatgccaaaggggtgggaaagctaaaattttggggctgcgccggttacgccctcttcagtccgttgggcggcgcgctgattcagagatattccaccggcagggtgacgccggtctttgcggttttgcttttgctgctgggactgttcatctggtttttgggctgggacgaacccaaaagcgcacaagagaatagccgtgttcagctgggacgaatccttcgggatgcgccgctgctgatttttttggcctatttagtggtgatgcaggtcccgcacagggccgcctacacgttttatcctctgctaattgaggatttgggcggcgatcagactatgatcggctacaccagttcggtgatgtttatctccgaagcggtgatgatgttcctctccacatactttttgaaaaaactcaagcccattcacatcgtgctgctttcttcctgcttttttgccctctggcaattcctgtacagcggcatgacggaggcctggcaggtggccgcggcagctgtgctggacggcccggctttcgctttcctctccttgggtatcctctattatgtggacgagatagccccgcctcagctgcgcagcacctatcagaccttgatctattccttctattttggcttgagcggcatcatcggcaacgtctggggcggctgggctgtggagaacatcggttaccagccaatgtatctggcagggggatgcttggtgctggtttccaccttgctgttctccctatacagcaggcggcagagccagaagaagggccttaatcacacataggacgcgggagagccccctcagctttctccctccaatcctgccgcgggcctgttgaaccgcggggcgtgatagagcgggcggacaggattccgcgtgaaatgagttccaatccctgaaaaggggaacaggataagaacaatttctgctgattgcaggtatgaaaagcaatggcttaaaacataaaggaggaccgactatggcaagagtattttcaagactgacgtttcattcatccagcgccaagctcaatcagggctttcagtgggcgatgcgtcaggcgttgagctatgtgcattcaggcggtgacccggtgggatattggtatgaagcggctctccccgggcgggatgccttctgtatgcgggatgtttcccatcagtcatccggggcggcggccatgggattttccgcccacaacctcaatatggctcagaaatttgccgcctccatcagcgagggcaaggactactgctgcttttgggagattaatcgggagggtcttcccgcgccggcagattaccagagtgacgagaacttttggtataaccttcccgccagcttcgatctgctggactgctgcatgcgaatgtatcagtggaccggcgaccagaggtggcttgatgaccctgttctgcggcggttttatgatctgaccatgcacgaatatattgcccgctgggataaaaacggcgacggcatccctgagcgagctgtggccggaagcgtccggggcattccttcttacgacgaatcgggccattccgatgcgctgatgatgaatgatctgctgggctgtcaggccgccggctgcgacgcctacgcctttttctgccagatgacggggagggagaaagaagcggaggactttcgagccgaggggaagcgaatccgcagcctcttggaaacccagtggtgggatgaagctgctggccgttattttacgatctgtcaacccgacggcagcctgatccacaaagggaaaaatgacctttccgcctccctgatttttgacggtgcgctgcggatcccagagcggcttttgggaatgctggatcagattgacagcacgtcccagcggtggcagattgaagggctctcccactgccccatgtacttctatccctacggccaaaaggaacggggcatgaagtggctgctcaggctgctggatcctgatgttcccagaagagagtatcccgagggatccttttcggtggtaatcgccttggcagaggggcttttgggcctgactcccatttggaacactgggacgctccagactgtttcgagcctggatcagagcctttctttcgcggaaatgaagcatatttccgtgtttgggggcgaaattgacctgcggcaggaagagagcgcttccgtgctcaccaaccgcacaggcagagagatccagtggaaagcagggtttgatggatgtcacaaaaccctcttggtcaacggggagcagaggtgtgctgtccaagaaacaattaatgttattcggggctgcagtttctgcactgtgcccctgaaagagggcgaaacagctcgagtggaggcaaagggatagaaggaacgagagaaaatccggctgaggctttttttgcccgatggatggcggctaatggacaaagttacatccacagcggggaaaattaaaataaagtgccccgctgccgccgtgtgattacagttgacctgtatctgcgaaagggcagacccctgtaccaaacagcgcgtcagggatatattgtaaggcttcgtaccgagcaatgggtccgcgggaaaccgtgagtcaccaaaaggccggacgtggagaggaaaatctctagtttgagcttttctcctcatgtccggccttttttttgttgtttcggttccggaaatggagcaagcgatggccttatatcagtggcaggaggcgttctgccggtatccctgactttccgattttctcccacagaaaaatcggaaaggagtcagaggcctgaagcgcgcctatcattttgtcaacgaaaccgtagaaattgaagttgaggaaaagtgggatcagggtctaaaagagcttgaccgtttggagtacaacaacaatcaaaaagagacacgtcggctttcctccttggatgacccgagtggaaagggcggtcacattccctgtgaggacaatttggaggagatggcggagcgtctggaggaaattgaggcgttaaaacaggcggtagtcactctggggcaaacgcaaaaggttttgcttcgaagggtctacctcctagaggaaaagcaatcggaaattgtcaggagaggggggcagcgggcggccatatccaaacggctcgacagggtttgcaggctgctgaaaaaattttttgaaaaatcttaaaaacaggcagaaagatttccagttcccgtggcttatagatagaaggactttttcggagggcttccccgccggaaagtctttcccagaaccatgacaactgaatacgcacttcatccagtcgattcccaccgtgagattgaggagccaaagccaaataaaaaactatgatggaaatcatggagaaaacaaaaaagttgatagcgaaactactgtcctatatgtgtgtctttccagagtggaaggagaaagcaattccatttccaacccaaaggctatgccgacggattacgcgaaacggcacaaatacaagaatgtccgtattttcgtggacgatagtgtttccggtgtcaccgtgaagcgaaatggattccagaagatgatggctttggtggaggcgggaaaagcctccgctgtaatcgttaagggtctgccccgtctggggcggaattatctagaggttgtacaagctcacggaaactgttttctcttgcacaacgttcacttcatcgccgtcaacaatggggtggacagcgagcagggcgaggacgactttatccccccttttttccataatatcatgaacgagtggtacgccaaggacatgagccgaaaaatgcgctccagtatacggacgaaaagcaaacaggggtacgccattggacggcctcctctgggatatatgcacgatgcagaaaacccgaaactctggtatgagaaggtgctgatcccctccatctatgccgagcggaagggctttaagaaacccatccggcgggctacccggggagagtagcaatgggacaccagcatggtgcgccagattttgcacaatcaggggtgtccacgatgccatcatctctcgaggggattgggaggccgtccaaaagacctttagagacacaaaatatagaaagccgttgcacatggagaaaaatatgttttgcggctacctcaagtactccggctgcggcgtaaatctcaactacatacacccatgacaacccggacaacactacgtttcctgccgcaataaacgggcaggaaacagcctttgcagcaaaacccagcacatccgggtgggtactttacgagaagttgtttgaagaaaaaatcctcggcaatctcaccgaggaacgtttcaagaagttgtctgagaaatacgaggatgagcaggccgagctgactcagcacatccggcacatgaaaaaagtggtggcggaggagcaaaagcatgagctgaacgccgagggattcctccggctggtacggaaatgcaccgatattgagatgctgatcccgaaaatcctccgggagttcattgacaaggttgtggtgcatcaccgggagaagcaagggaaagaaactgtgtagcaagtagatatatactactgcttcattggccatgtggaactgcctaagcggagcaagccccggcgggaggcatatttgctcagttttggccgtgaaaaagaagaaagccaaagtgcctaaagcactgaggcttacataaaaagaaaatacccacagggactcaggccccttatgggtattcactatggggtgaatgatgggacttgaacccacggtctccagagccacaatctggcgctttagccaactaagctacatccaccatatggcgcgccaaaagggactcgaacccctgacctactgcttagaaggcagttgtgcaaaaatgagaagaaaccggaaccgagttccggtttttttatatttccgggcaaccgggagactggcctgcaaggaattgcagagtaaaattacaggaggacttaaaatgtcaatcaaaatcgcaatcacaaatgaaaaaggtggctgcggcaaaacgaccacagccgtcaacgtctcggctattcttgccgagcatggattccgggtgctattgatcgatgccgacccgcagagctacagtacgatgtactacggcctgtatgcgccagaacgtccgtcattgtcagacgtcctgttctatggcgagaagccggagcatacgatcagcactacagagttcggagtggacgtcctgcggtcgtccactgcacttatggatgccgaggagcggctcgatcagcgcaagattaacggtctgcactataacgatctttttgtgaatacactttccgcgctggaaagccggtacgactatatcttgatcgattgcccgccgcagggctacaagctgctcgaaaacatccagctttatgcagactatctcctgattcctatgatcgccgacgagtttgcgctgcatagcctgcggattaaggccgaaaagattctcgagatcaggaaaaatctgaatccgcgcctgcggctcttgggtggtctgattgtcatggacgagaaaaacaaaaccacaggcatttaccgggacgttttgcagtcgcagaacgtcctcccttttttcaaagcgacggtccgaaagaatattgcgctgcggcgagcgatcaattcacatgaaccgatcaacgtatatgaaaagagaagcaatggagctatcgactatcaggctgtaacggatgaactgctttggagggttgcgaaatgaaaaaaatgaattttgccagtattaccgccggtttggacacacttaaagatgtcatgcagcagaatgcagagattgctcaagataagctgattgatgtcagcttcattgattttgcatcccaaaatacctttgcggcggatgataccgatgaaagtattcgcgagcttgccgattccattgaactgctcgggttacttgagccgctggtggttgttcgggatgacgatcggtacacgctgatcgctggggaacgcagatataaggcgattacgcaatgcctgcattggagtacagtcccctgtcgggtgtttgatggtgaggctttgagccgtaaccggaagcagtttatgctgcatgaggccaatggtcagcgcgatctgagtgctggccgccagctccaggtctttgaggagtataatgcgcttcttgaggaaatgatgcagaacggagagtacacaggcgcaaaactcggcctgatcgctaagaaaatgcagatttccgaccgacaggtcagaaaatacaagcgcatcgcggagcagcttacccggcaggaaaaggaaatgcttgctgccggtgagcttacggtgactgaggcgagccaaattgcagtggccagatcgaaaaaatcggaactgagttccggttcggtggagcggccagaggtaaaatcggaaccgagttccggttcggcggagcggccagaggtaaaaccggaaccgagttccggttcggcggagcggccagaggtaaaaccggaaccgagttccggtttgacggagcagccagaggtaaaaccggaaccgagttccggttcgacggagagacaggagataaaaccggaactgagttccggttttaaagaggaagcagaatgctttgaaacaccagaggcgcggaaagttcttttggaagaactgattttgttcgggtgtatttgggaaccggaaaagctgcacacggactatgtacagcagatgccgacgacaaaggaagcgatcgcggagattttaaagccgagatacaatttccggtcgtgctcgatctctctcaatggcctcgaagggcagtgcacgctgaatgcgtcaaagctgatcgtcgaaatcgataatccccgcacgacagtgatctacagttacacagaggttgatgcgatgatccgtgagctgtatcgcggaggcaagctggaggtgcggagatgaggattacaaaggtgcgcatccggctctgtgatgcaaaaggcggccctttagcatttgcttctgtagtgctggatgatgcgtatatcgtatatggcatgcgtatcattcgccgcgcggacggtgcgccgcagctcctttatccggaggcagaacacgtgcgaacgcgcgatcagaagcaagcatacgcttttcgtccgctcagttctgcggctcacaggcgcatcgagcaggcagtgctgcaagcatacagcaagaagattgggggaaattggtatcatgtgtgattatactgcacaagaagtaataagcaaggttgacgtaggattgaagctctatttcgaagtttgggatgcggcgatatttcacggcccgggtaatgtcggatatacatctgttgtcaacgatcatatccgggatttctcatatctggccgatcaatcgaggcttacggagatggtggaggaatcccgcagagggattgccgagttcctgaaagtcccgccagaaaaagtgcgcctgattacccgcgaggaatttgaggctgaaacggaagatgatgaagattaagaagcgcatccgaaggttgtatcgccggatgcgctttaaattttggatggccgggcaggattacatccacaacaatatcggaattcacgaaggcccgccgccgtcatactattggcggcgttctgcggaagaattggcgcaagaacgcagggcgatgctggaggccatcgatcggctgatcaaagagaacggtgaaagatacgaaacgaaaaattttaaatcgggaggaaaaagtggttatgagggcgaagcaaacggcaaatttttcggcaaaagatatttcacgcttgatggaaaacatgacagataaacagagagatatgatagagggtgtagattggcttgctagaaaatttgttaaatacgcggactataaggagttcactgttgaggagattattcgggcctctaatgaatcgttgtacgagattttaacggaggtagagggatgatgaatcataagtgtatccgacgattgtatcttcagatgcgcttataatttttgtcgaggtgataagtgattatggtcgatccgaaatactctaagatctatttgagtgggtttgccgcaggaaaacagatcacggaagaagcactgcgtgaaacaaaacaaaaaagggtgagcaaaggaattgcggctgcaagagaaagaggcgtccgtcttgagcgtcctcctaaaccgcgaccgaaggagttcgagcagcttaaagctgcgtggcttaatggcaatatctcatcaaaaaaagcagcggaaatgatcgggatttcaccggatacctttttgagatgggctcgcgacacatcaccacgaaaaatgctggttgaagaagcgctggaaattttgcacgagctttcaagccgattagatgattcaaacgacggcaatgccaaggaagcgattgaagtagtgtcgcagttcataagcgcgcggcggaaaagaaattgaaagaagaaacggagaaagaaaccaatgaatttgatattgctgaattattcggggctataccggcagatggaatacggattgcggtgtccggtatgcggcgcgccgatagaggctgtaaagagatcagctaactggttcctcgaatgtcaggagtgcgtcacggttttcggaggcttttcgggatcaaaagcaggtggctttccgagccgacaggaggcggtagatgctttcctgatggcctgcgcgtccaagatcaaaaactagagcccacagattgacaaaatctgcgggctctagtacaatagcaaagtaaggcttaccatacggatggcggttgccctcggtgttcatcacttggagggtaattcttcttgccctcactcctgatacagagagggggcgatacccggtgtacttaaccttgaacgatttttgccagctcatgctggtgatcatcggtattttgagcttaatcatcgcgataataaagaagaagtgagccgcctttcccgaggcttcggctcacttcttgccgcaactgagggctaaccgtcaccggtaagccttacacttatattatagctgaaattgaataaatgtcaagtatagacgataggaaagagccgtgcgcgcggctctttttcttgacacaaaccaaattttggactatactctaattacgaggaggaaaaaccatgaaagaaaaatttaacaatctaagcaagaagaaaaagcagatcatcggccttgcggccggtgttatcgttgcgacggcgctgcttatcggtgggatggtggcctgcgggtctcccgaaacgacggagagtgatccaaaggcctcgccgtcggccagtgcatcggcaaagccgtccgcaagccctaaagcggatgaaaaggataaggacaaggcaaaggccagcccatcggcgaagccgtcggcctctccgaaagcgtccagcaaggataaggacaacggcaagacggaatccagcaagagcgaatcgagtaaatctgacaacaacaagaaagacgatgagagcagcaagggcagcagctccaagccgtcctcgacggctacgaaaaagccgtcggccacaaagaagcctaccgctacggaaaagccgtcgagcggaagctcatctaagccgagcaccggcagttcttcatccaagccgactgcaaagcccaccgcaaaaccgactgagaagccttcctccggcagcagttctggcggcagcaccacagtaaaaccgaccgagaagcctgctgcgacagcaaagcctacggcgaaacccactgcaaaacccactgcggagccgacaccagctccgacgcctgcgcctacaccggcccccacgcccgctcctaccccggaaccaacgccggagccggttcccgaggaaccgtatatcaccggcggatacattagtgatgggttgtttgatagttcttacgatgcggctgtatatgctgaatcaaactgggataaattgttgcctgatggcaactatgtcaatggttattatatcttagatgtgtattattctgacggcagcacaaagtacaccgtcgagtggtactgataacacgatgaaaatgcaatttttttgactgtggattggcttaaagccgagtcatcattaggtgaatcaagaaagagataggtgaatatgttgttgtcgggatttattgagaatcaacctaaaacccacgagcagtatctcgttgagataaacaagaatacgcccaatacagcgacacttgccactatggatgcagccgaaaaggacgaggacagctatggcccgttcgatgacgtgtccgccctgatggaagcgctaaatgcctgaagaaagagaacctgttctaaattaaaacaaaataccgtacaaaagaggattgatttttgtcaatcctcttttttcatgcaatcgaggccgcattacgatgtagtgcggctttcttcatatagatattttttggaaaggacaatggaaatgaaacgaatgaagaaaccgcttgcgtggctgctatcggcattgctgctctttacagcgctgccggtaacggccttcgcagacgaggttgcaccggtggtgacggcttcggtggatgccacttcggaaacagcaccaacggcagaacctgtcccggagacagaaccggaaccgagttccactccaacggctgttccgtcggtggctcccacggaggaacctgttccggattcggaaccgagttccgcccctacggccaagccaacggcagcacccacagaggaacctattctggagacggaaccggaaccgagttccgtcccgaccgccgcgccgacggtaacgcccacggaggaacctgccccggagatagggacagagccgagctccacgcctacagcagccccgacaacagcgcccacggctacgccggaggctgttcctgtcgaggatccctatgtgccgggcttcaccgtgatcgagtcagagattggtggcgcgcacgcttggcctgtgccggataacttcacggtcacgcagggctgcggcgaccagcatgcggcgcttgacattgccgcagataccggcacgccggtcgtcgccgcagacgatggcacagtcaccgtaacgcagacgtggaacggcatcgtgacgcagggggataacaactcctacggcaacatggtgcaggtcacgcacgcagacggcaccgtgacgctctatgcacacctttcggaaatcaatgtccggcagggcgatacggtcgtgcgcggacagcagatcggccgcgtcggcagcaccggcaactcaagcggcccgcacctgcacttcgaggtgcgctcaaacggcagcaaggtcgatcccatggcgtatatcacagaggacagcacatacgccgagaagaaatttgaggagctcctcgagcagtacggcggctatatcggcgaggacggccagcttcgaacgatcgacggccgcgaggctatcgataagacgctcgctgagatcgccgaagaagccgggctgactctcccggttttctatgccaataatgttactgtttctgagccgcgctccacctaccttatgaatatcggttatgtcaccgatgtagaaggggctacaaatggctggggcggcaagcgcattaacggtaaggttgcctactgtgtcgagcacggcatagctttggggttaggcgataacagcagctatacacagcaggatttgacaagggagcaaatgaacaggctaacactcatcgattactggggccgctataaaaatgttgccaatgtcaaagggtgcagcgccgtaaactacaactgggatacgattgacgtgtcggctgaatacatggcggaattttattgccagctcctgatttgggaaaccattaacagctttggcggcagcttcgtcggcgcatccagcgtctctattcccagtacagttggcggtatggacaatatcgcttctcagtctacctacaatgcctttaaaaaggctgtgatggaaaaggtcaacctgttttatacaacacccagcatcgacggtcaaaccgtgacgttgaagatgggggaaactgtaacgctaacggatacaacaggtgtgctttccgattataaagatattcccgttgtaaatacgaccggaattcaagttgaaaaaagtggtaatacagtcaagttaacagcaactggaaccccaaatgcttccggggctgttaggtttgcatataatgtggatcttaactattatacagatgaacccggctattattatgaacacgcagttagtcaagatgttgccacctgtggatttgctggcagagaccctgttgcaatgacgctcaacgtcaatatcgaaatgaacggctccttaaagatcgtcaagacctcggaggacggcaatatctccggtgtacgcttcaacgtcacgggcaacggcgtgaacaccacggtgcagactgccgccgacggcaccatcaccattccgaacctgaaggccggcactgtgctgaccgtgacggagctcacctccgaccagtacgtgcagccgcaatcgcagacggtcacgatcaaggccaatgagaccgcgactatttcctttgcgaacgtcctcaaaaaatggacggccacgattacgaagcgcgacagctcgaccggtactgcgcagggcgacgcctcgcttgcgggtgcagtctacggcgtgtaccgcggcaatgacctgatcgatcagtacaccacaaattccgatgggcagttcacgacgaaggagtacgtctgcggcgataactggtacatcaaggaaatcacgccctcccccggctaccagctcgacagcacgcgatacccggtcggcgcggcggccggaaaattcaccctcgagcacaatcaagtcgctgtctctgtacaggagcaggtgaagctgaataagatcagcatcacgaagtacgccgacatggtgaacggcgacgacgtgcccgaggagagcgcggtttttgaagtgtacctcaaatccgcaggcagctatgccaacgccgacgcggccgagcgcgaccgcattactacgaacgcctccggctacgcggtcacgaaggacttgcccttcggcacgtatgtgctgcaccagacggccggcagcgacggccgcgagctcgcgccggatcaggaggtgacgatcaccgaggacaagtctgcgcatgcgacctacggcgtttcgatcaccaattccctcaagctcggcggccttgaaatccgcaaatcgtccgaggacggaaagctcaaggactgggactttgagatcacccgcgacatcgacgactggtcgctggtcgtcacgaccggcgctgatggcagagccgtcgcagagaatcttcccgtgtatgccgacgtcgcaggcaagcagcccatccgctacaccgtgacggagatcaacgtcgaggataagtacaaacagcccgaaccgcagactgtgacactcacggagcatgcggtcgtgacggtggacgtcgaaaaccggattgcccggggcagcatccagttgctcaaggtcgatcatgacggcgtgacaccgctcgaaggtgctgtctatcgcttctggtacgaggacggcacagagatcacgactgctacgacggataaagacggaaagatcacggtcgaaaacatcctgtatggcaagttcttctatcaggagcagaccgccccggagggctacgacctcgacgaaacgatctacgaggcttccgtggactacgacggccacgtcatcaccgtgacccgtgagaacacgccgagcgtcggctcgatcacagtcaccaaggtggataccagcggcaccccgatgtccggcgtctcctttgccctccaattctcgactgacgacggcgtgacatgggatttcgtcacggcccgcgaggcggacagcaaggtctccatcggcgggtgcgacagccccggtcttgaaaacggcgtcctcacgaccggcgaggacggcattgcggcctttaccggcttgcaggtcgataaccagacggtgacgatcctttaccgtctcacggaagtttccacacaggacggcaatatcctaattggcgacattctctttgaaggcagcctgccggcgagtatcgacggcgagaaggtggccgacgtcacgatcacggcagttaacggcagaaacttcgagctgccgggcgctggcggcggaggcttcccgttccagacggtcggcatcctcctgatcgcggctgcgttctgctcgggatttttcatctacacacagaagggtaagaagatcatgaagaaaatgaaggttctttcgcggctcggcgcggttgtgttggccgtcgcaatgtgctttagtgcggtgacggcttcggccgcatccgtaacggaggcgacaatcgatccggatcgcgcggcgtccctcgagctctacaagtacgatttcacgacggccaacgaggacggtgtgctgacggattcgacgtttgtatccaccggccagcacgacagcgcggtggaagaagcgcttgcgccgtatgcgattcagggcgttgtctacacctatgccaaggtggcggacatcatgacctactcggagcaagagacgaccggttataaagatatggtgctgtatgccctgccggataactcggcatccgctgagttccttgcagcgctcggcttgagccgtgacgacgcataccgcatcgaccacaacgaactccaatttatgagcgacacgctcatcgacggcctctccgcgcagctcggctccatcgagagccagacgaaaaacgcgctggaagcctatgtccacagcaacggcggcatcgacatgccggaaaccgatgcctacggccattcctccgtttccgatctcgcacaggggctctacgtcgtcgttgagacctatgtgccggagagtgtcacttccacgacagcgccgttcctcgtctctctgccgacaacgacgaatgacggcgacaactggaattacgacgtcgtgatttaccccaagaatgaaaccggcatgccgacactcgaaaagacactgcgcgaatcacaggcagacaccggcaagcacaacggcaccacagacgacatcgcggacggctatgcccacaccggcaccggctcggacggcgacgttgtagactaccagatcatctccaccctgccgacgattacctcggatgcgacggcgctcacgacctacacctatgtggacacgctctcgaagggcatcgagtacaacaagcaggatgtgagaatcgaatggtacatggattccgcctgcaagcacaagatcaccgagtggacagaggccgacggcaagtttgacgtcgcctacggtacagccgacaatgacgccacgacgatgaccgtcacaatgaccgaatccggcctcgatgagatcaacaacagcgacgccgtatacgacctcggcacgagcctttaccgcggctacagcgactgcacgatgcggatcacctacacggcgacggtcaactcgtctgccgatatggtctacggcgacgacggcaacccgaacgacgtcacgctcgagtggcggcgcacaaacatgacctatttcgacactctcgaggacgactgccacttctactcctacggcctcgatctgctcaaggagttcaacgacggcaagggcaacgtcgcaaatgtccagttcaagatttggaatgagacggacaaatactgggtgcaggccgctctgaacgaagcggagggcgtctactacgtcacggatcacgtggatgcagaggcggacgccacgacgttcatcccggttgagggtacgcagaagattactgtcaagggtcttgaggacgacgagtacgtattgacggagatcgcgacggacaacaagtatctgcttctgaaagacccgatcacggtaaagatcacgacggcagagaacgacgtaatttgcgctgtgtgcggcaagccgggcctgacagcctcggcgacggtcaacggcgatccggttgccatgaccgaggacaacggttccgtttcggcgatcgtgccgttcaaggtgacgaacgtgcgcgggccggagatgccgaaaaccggcgatcagggcacgtggctgtatgcggcaggcggcgtgatgctcgtctcgcttgcagcgggcggtatcctgatctgcattaaacgtcgcaaaaatcagcctgagaacaagtaaagcagcttgaaccggaaccgggttccggttgtgcgcgcagagtgagaggaaccggcggattgctccgccggttccttgtaatgcggggtgccggtcacaaccccggcggaaaggagaaaatcatgttaccacacacgttttaccgatcgatattcgatttctacatggaatcgacatacttcaactatgattgggagagctttttcatccatgatgttggcttatgcgagaaaaacgacaggtgcggaacaaagtttgacttcatgtccgatgtccgtactgcatttatggagaaaggtataagcaagcggaatgcgcactatatcctatccctgaaaatgactgatgaacagatcgagaaatactttaattccaattacgatacaagacacctgtttcgaataatgatcgcacatctcatggacttagatagcgagcagatcgcgcagatcgaggataaaagccacgaaccctattcgcaagcgcttctagtacagtttatctgcggcgtaccggcagataaaaccgctccgatccttgaaatgcctgtgtctcagacagataagttggcgcatatccgggagctgtccggtgaggaaacctatacactggtctcgcgcagctactgcaaaggcaggcgcaagactatatccgtaaaagcccgacgtacaccggaagatgatttcattgatgacagcggaaatatctataagaatttatttgatccccctctttatacgcagtttgaatattgagcactactcgcgctcgggaaggagaattttatgttttcagagacacacaggccggtaaattacagatcaatactggaaatatatctggaatccgcgtattttacgcgtgaatttgaaaaattccgcagcaggcatattggtttctgctttcggaatgggaaacaatatacgtttcagtcttacagctatgcaacatattctcagaaaataggaacgcaggccattggcgcgtctttatcatgtaaaatgacggatgagttaatcgggaagtatttcaattccgggtatagtacaaagcagctgttcgcgattctgatggcacagctcatggacatggacagtgcacagctcgcgcagcttgaggatcagcgctgctctttttgttctgaggcgctgctttcacagtttatgcacggtgcacaagctgaagaagtcgcacaaattcttggtctgcaaatatcggatgcagaaaaggagaaccgcattcgggcgctgcatggaaaagaaacatacaagctggctgcatcttatttttataaaggcaaaatcaagacagcatatgtagatgccagacgcatgccgaatggagattttgtagatagtcacggcaatacatacaagaaacaaaaagaagaatacaacaataccgcttggaggatgttgagatgaaggccccgatacgataccccggctccaagtgggcgattgcagattggattatcagtcatttcccggaaggctacgagaaaatggtctatcttgagccctttgccggatcgggggcagttttcttcaataagaatcccggcgcggtcgaaacggtcaacgatttggacagcgatattgtcaaccttttccgcgtgctgcgggaatacccggcagagctcaagcaggcgttggtacttacaccctacagccgcgaagagtacgacctttcttttgaaccctgcgaggatcctttggaaaaagcaaggcggtatatggtgcgcacgacgcaggccatcggcgcgaagatggatggcaagtgtgggtggaggaaccacaagcaaatgaaaatcggtggaactgcctgcaagtgggtgggcatcaccgatgtaatcgatgctgcagcctcccggctccggggcagtacggcgaatcttgtacagattgagcacatggacgccctacgcctgatcgagcgctatgacagcccggatgtgctgatgtacctcgacccgccctacgtgcgcagtacgcgcaggagtgggcgcctgtacaggcacgagatggacgacgggcagcagaaaagacttcttgcactcgtgacaaagagcaaggcgaagatcgtgctgtccggctactcgtccgagctttacgacgatgctttgaaaagctggcataaggacgtcactctatcgcagacgacatccacagaaaaggcagaggaggttatttggatgaatttcaagcctcgtcagtgcagattgtttgatggaggcgcagtatgacctactgcccaagagactgcccgcggcggtcggcgttctgccacggcacatgccagcgctacctgaaagcgcacatccggcatatactgccatgacaatccagagctgattaaaaatgcgtaaagtaagctacaagcgcttggccgggagcacagaaaagagcaaaaataaaagcgccggcgcggccagtagaggaggtgatcgcgacgaagtttaaaaaagcccctgttatagcactgagcctttttctgctcctcggcctagggctgatcggctatcccattctcagcaatcttttggcaagcggggagcaatccgctgtgcaggcgcaatataccgatgaggttgacgatatgacggacaccgagattgaatcggagctgcaagccgcgcggctctacaatgaagctctgcaaaacgtaaagagcacggaggcgatcgatctgcgcggctatgatgaactgctcaatctcactggaaacgcagtgatgtgcaccgttgaaattccagcgatcgacgtagagctgccggtttaccacggcatcagcgaggatgtgctgcaaaagggtgctgggcatatgcctggcacctctttgccagttggcagcgagagcacgcacgcggtcatatcggcgcattccggcctgcctgccgcgcggctgttcacagacctcgataagctcgaggaaggcgaccttttttacatccacgtgcttggcgagacgctgtgctacgaggtcgatcagatcgtggtgacgatcccatcggatacggaagccatacagatcgaaaagggacgagattatgtgaccctgctaacctgcacgccgtatggcgtcaacacgcaccggctcttggtgcgcgggcatcgggcagagattcccgaaacgccgcaggccgtatcagatgaacccgcgcagccggaaagagcctctacatggacggagaaatatctacagggcattgctttcggcgtagctggcgcggcgctgctcatcggcagtctggtgctcgcttggaaaatcaagaaaaaccggaactgagttccggttttaaattttatagaggagcaaatatattgtaacagaaaggaaatgatttgtaatgactaaatattacagagttatggaaatgccggaagatggctggagcatcaaagctcaccagccaatgtatgatgatgatcccgatacaggcgtttatgaggtggatgtcccgattgacgtaggcacatacattcttgagcacgatgaaacacagccgagttacagtgttatgtgctttggaaaatcgccggaaccccagcattattgggaggctgcattggatcgcaagtctctcggggagctgatcaggcaggggaaaatcttagaagttccggagttgcttttgaccaaagaatcggagatttacattatcatgtctgaactcgaggagaaaatgcagcaggcgcagttcgtttgtgaatatgatccgaaacaggattttgatgcggacgccccggagtttccaacgatactttgtcagctcaaagcagcaaaaatagaggccacggcgcaaattaagaatatcgagctgtatcttgcagaactgagggaagaaagacagaaagaagtttttgatgtgcttgagactcttcggaatagagagaggaggtcggagcacatctacggtgagcggtctatccgcagccagctcaatgaaaaaaaggggcggacgcagcaggtcaacgagacaaaagtgaaaaagcgcggcatctcgcgctctatgtaagtggagatgagatgcaggtaagttgatcggaaataaattggagtgtggaggaatggggccaatggcaagttctggacagaagattgtagatcttctaagacaaacagcacgcatgataatgagcggttcagaagcctatatgagctttttggattcagcggcagcgaattacaaatactgctggagagatcaactctctatttatgcacagaggcggaaagctacagcgtgtgccgattttaagacatggaaccgcatgggctactggattaagcgcggaacacagggaattgcgctgatcgatgacagcagcgcaagaccgtttgcgctgcgttatgtttttgatattgcggatacggttcggaggacagggccagacattctgctttggcgcatcgggacagaatcgatggtatcggttgtggagagaatcggagagcaatttcagcttgatgatacgaagttggatctgtccgattctctatccagcgtggcgaaacggatcgtagagcagcgtatgaatgatgagctttacacggtagtggggtggggcgaaagcgaaaaagctgtagctgaaaaatttgtagcggaaagcgttcggtacatgctgcaccgacgctgtggactggaaccggataatgaggcgtattttagggtttactttgcaaatgagacgcggtacaatactcttaaagagatcagcattttaggagaaaccgcaagttctgcggcggaagcagtcttgagagaaattgaaaaaactgtgaagcgcttggcgcgggatgaaaggagcagacaaaatggagatcaattacaagaaagtgggagattactacctgccggagctggaagcaccagaggcaccgaaaatcgggaagtacgggatgctgagacggacatacctgcaggagcaccagatggggctttacacgggcatgatgatagacgggacgctgaacgagcatctggaggagatcgaccggcaagcaaacgagatgatggagcagatcacagagcagatggtgaaggagcgcggtatagacgaagcactgaaagccagagaccagatgagctgggtcggagagatgaacaacatcaggagcgcggcggaggagatcgttctgaacgatctgatttacagctaaccggtcaacccgaactggtttcagggccggaacagttttcgttgttcccagccggacaagagaaaatcgatcaaagccaaagagcagaggatagcgaaacatcccctgctctttcactttcacaggaaaatagacaaacgcaatctgagtcggcgtcagaggaacaatcgtctgagaaggcggatgtatcggacgaaacggcgaccactgacttttcaaatctacagaaaaaggcagcagaaatctttaagagatacgagaagctcgatttgcaggacaaaattaatgtcatagcaaaaaccttcggctacgcaacaggcaaaataaatacttctctctgtgcggggaaatggcgcgggacgagtgatattttcatcgagtttgagcgcggggggcggctgtatattggcaatcataggacaacaaaggctaaaacgatgaaggcacagcgcgtgtgtgtggattcattcttgaggcgttataatccggagatcgtccagataacaaaggaggcggctgttcctgcactgttaaaacgggaagaaattgataatgaaatttccgtgcaaaagggtttaaagccctatactgtacttaacgtagagctgagcaacggatcagcggaaatgatcgacggttatctcggttggtattatgtgacactagccgtagatggaaaaatccgagcacatatggagacaggactgtgttatgatatagcaaacggaaaagtaagcgaaacaccctcgaaaaagagttaccacgttgccggtgcattgaaagaagctgatgttgattatgtgtttaacaatgtcggtttttcatccacttccgatgtgtattcgctgaaaatgccggatgatgtagtcgagcgtgcccgcaagacacttgcggaacgcgaaaaggcacaagcccgtcaagtgcctgatgcagaaaagagaacggatctacatacagaatacaaacagctcaaagaagcctttcctgatgaaattgtgctgtatcaagtcggtgatttctttgaactcatcggcgaggacgctgaaaatgccgctgagctgctcaagctgacgttgacaagccggatggggccggacggggagcgtacaaagatgtgtggatttccggtgcatcagcttcaggctcggctggaggtgctgcgagacaagcatagtgtagtcgtttcggagttcgatccgaaatcaaatctccggcagacgtattcagtagattcaattgaccgtgaggcggaacgcgcaatcgatgcccacgaagccgagtttggagcagatggacgccgggttttccgcgaaacaagctcgggtaaagatgctaaagagttcgtccagcaggaggctgcggaggatgaaacgctggagcagccgaatcaagcaggatcggagagtgtggtgcttaatgcgcagatacagccgattcggaaaagagttataccgacggtcatttttccggaaataccggatgcagaacgcagggactaccgcattacagacgatgaccttggtgtcggcgtgccgagccaacgatatgcgcggaacatagcagcaattcgtctcctcaaagagctggaaaaggataaacgccttgcaacgccggaggaacaggccatccttgcgcagtatgttggctggggcggtttggcagactgtttcgacgagcgtcacagccggtacgatgagctgaaagcgcagctcaccgaaagcgagtacagtgcagcgcgggaatccacactcacggcgttttatacacctccggttgttatacgcgccatgtatcaggttctcgaaaacatgggatttaaggctggaaccatcctcgagccgtcctgcggtgtcggcaactttctcggtatgctgccggagagtatgcgggacagcagaatctacggcgtcgagcttgacagcatttcgggtcggattgcgcagcagctctatcagcgcgagagcattatggtgcaggcgtttgaaaatacggagctgccggacagcttttttgatgtcgcaatcggcaacgtgccttttggccaatttaaggtttcagaccggtgctataataaatataattttctgatccacgattatttctttgctcgcacgctggataaagtacgcccgggcggcattgttgctttcattacagcgaaaggcacgctggataaagagaatccatctgtgcgtcgatatatcgcacagcgcgcggatctgctcggcgcgatccgactgccggaaaatacgttcaaaagggcagcgggaacggaggtcacagcggacattcttttcttgcagaaacgcgatcgtgcggtaagcatagagccggattgggtgcaccttgacagagatgcgaacggatgcacaatgaatgcctactttgtcgagcatccagagatgattctcggaaaaatgcagataatcagcggcccatttgggccggaaacggcctgtgttgcacaggaaggtgacgatctggatgcgatgctgtccgctgcaattcggcgtattgaggggcaaataacaccgtctcagactatcgcacaagaggaagtgggagagaaagcgattcctgcagatcccatggtccgcaacttcagctttgcacctatcgacgggaagctctattaccgcgaaaacagcctgatgtatcccgcacaggtgtctgcggggtctgaaaaaaggcttagggcgctgattgacttgagagactgtgttagaaccttgatcgagtatcagacggaagattatccgaatgcggaaattcaggcacagcaggagcagctcaacgaattatatgatgcgtttgtacagaagtttggacgagtcaatgcccgggaaaacatgcgggtgttccggaatgatgattcatactacctcttgtgctcgctcgaaatccttgatgacgaagagaatttcgtccgcaaggcggatatgttcacaaagcgcacgattcggtcagcagttccagttgcacatgtggataccgccagcgaagcgctgaccgtatcactcggtgaaaaagggcgggtcgatatagcttttatgactgaactgaccggtgcgagtgaacaagagctcgaggcggagctgcgcggcgtcattttccgagacataagctgtccggaaaatgcagaacagatctctccggagagcgtcgatttggattcgtatccgcttgttacagccgacgagtatttatccggcaatgtaaggcgaaagctgcgcatggcgcgggcaatgtatgatgctgtgccatacgatctgaaagaaacggttgagcacaatgtacgggcgttggaaaaaatacagccggaagatcttacggctgataaaatcagcgtgcgtctcggagcaacgtggctgcccgagcacatagtggagcagtttatgcacgagctttttgagacaccgaggtatgcaagagaaaaaatccatgtgctcttttcagagtatacaagccagtggaatataacgaaaaagagctttgatcacaataacgaaatcgcgaacagtgcctatggcacagaacgtgtcaacggatacaaaatccttgaggaaacgctgaatctgcgcaacgtgcgtgtttttgactattatgagagaagcgacggaaaacgcgtctcagtgctcaatgagaaagaaacgattgctgcgcagaacaagcaggagcagatcaaaacagcgttcaacggctggatatgggctgatccgaaaaggcgcagagaagtcagcaccttgtacaatgagcggttcaacagcacgaggccccgtgagtatgacggcagtttcctcaaacttgttggtatgaatccggaaatcaaactgcggccgcatcaggtcaatgcgatcgcacgtatccttcttggcggaaatacgctgcttgcgcatgttgtcggtgccggtaagacttttgagatgattgcggctgcgatggaaagcaagcgcctcggcctctgcagcaagtcgctgatcgttgtgccgaatcaccttacgggtcagtgggcggcggaatggctacagctttatccgagcgcttcccttttggtggcgacagaaaatgaattctccacgcaaaaccgcaagcggttttgcgcacggattgcgacaggcaactatgatgcagttattctcgggcatagccagctagaaaaaattcccgtgtctgtcgagcggcagcgggaagtgttggaaaatgagctcgaggaactcatcgaaggaatttctgagctgaaaaaccgggaaggcgatcggttcagcatcaagcagcttgaaaaaacaaaaaagagtttgaaacaaaagctggatgcactgaacgatcagagcggcaaggatagtcaggtcacttttgaagaattgggtgtagatcgcctttttatcgatgaagcacaatactttaagaatcttgctgtattcactaaaatgcacaatgtcagcggtatcagccagacagaagccaaaaaaagctcagatctctttctgaagtgccgatatatggatgatttgacagacgggcatggtattgtatttgctacaggtacgccgatttcaaacagtgtagccgagatgtacacaatgcagcgctacctgcagtatgccaccctaaagaaaaagggcctgctgaatttcgacgcatgggcaagcacctttggcgaaacagtgacggcgatcgagctggcccctgaaggaacaggttatcgcagcaaaacacgttttgcgagattcaataacctgccggagcttatagccctgtttcgtgagttcgcggatgtgcagacggcggatatgctgcaactgccagtaccgaaagcaaactatcatacggtgcagcttgagccgtcaccgcaccaaatggagataattcgagagatagcgcagcgcgcagaacgcgtacacgcaaggatggttgatcccacggtggataacatgctctggattacgagtgacgggcgaaaattggctctggatcagcggttgataaacccagtgctgccggattcaaagacgagcaaggccacagtatgcgcggagtatgtctatgagatttggaaaaaaggtcaggctgaaaagtggacgcagcttattttctgcgatctttctacacccggaaaaagagtgatccaaatggaagaaaacccggatggggaaattttgatgtcgaatttccaaaatgtgtatgaagatctggaacgaaaactcgttgagaaaggtatcccgaaaaatgaggtcgctttcatacatgatgcaaagaagcaggcagacaaaaagaaattgtttgcaaaagtacgttccggacagattcgcattttgatcggttctacagacaagatgggagccggaacgaatgtccaaaatcgtttgaaggccatgcatcgtttgacgcctccgtggaggccggctgatttggaacagcaagccgggcgcatcgtgcggcaggggaatgaaaatgccgaggtggacatttgcacctacgtcacgaaaggtacttttgacgggtacatgtatcagacgctggagacaaaacagaagtttatcggccagatcatgacatcgaaaagcgctgtgcgcacgatagaagatattgacgtgatgacaatgacttatgcagaggttaaggctttgtgcgtcagtgatccgcggattaaggaaaagattgaacttgaaatcgatgtgcagcggctgaacacgctgaaagcgagctatcaaagtcaaaagtttgctttagaggatcgtatcacgcagcactatcccaaagaaatccagtcttacgaagtgcgcttgcgtaagctgaaagaagatttggcttttctcgaagaacagccttcggcagatggcttttcgccgatgaccgttcgaggaagaacctacgaaaagcgaaaggaagctggattagcgatctgtgatgcagcaaagatgatgaccactgcggaaccggtttcgctgggacagtatcgcggttttgaaatggaactgagttttgatacgttcaatcgaagatatatggtgacacttgtacatgcgatgcgatacccaatagagattggctgggacgcacaggggaatattacccgtctggatcatgcactggccaatatcggcaaagatattgtagatgcgctggaaagacttcaaaacctccaagggcagcttgagaatgcaaagacggaggtcaaaaagccttttgatagggaagatgagctgagagaaaaaactacacgcctcggcgagctgaacgtagctcttaggcttggcgagcacgagaatgcagatgtagttgaccgagctgttggcgaagtagagcagccggatatgaagaagtgttcggcaaaggaatgcgaacgagcactttaagtgctttggtggaagttgtaacctgccgtagagcgtgttatactgtactaaacttgtgaatggaggaacggaaaatgttagaaagagccgcaacggtaatgatgtacaaaaatggaatggcgatctgtgaggatggacgcggagagctgtggtatacagagattccggaggagtatgccgagatcggcacggctattgaaattcgagaccttgatgcgctctcaaagctgccgctgcctttgcagaaagagatcatggacgagttgagcagtatgccgaaggcgcttgtggatgagctgctcgggccggaggtgatcgagtaatgccgcgaaccaatttttcagaggaggaaagagagcggtatcgtgagcagcggatggctgaatttgaggcgtccgtcacggagctgatcaatacatggcatgaaaacccggaggaactcgaaaagtacatccggtttagaaatcaattccatcaatacagtgtccggaattccatgttgatctaccgcaaaaatcccaacgcactgtttgcaggatctttcaagaggtttaaggaacttggctataatgtccgagcaggggagcaaggtatggggattgtagcttatacgccgatcaccttttaccgtatgaaaccggatgcggcttggtataatctgtccggagcgccgcagagtgtaaaagacatggttgaagccggtatgattgaaacccgtgaagaacctcatttcaaagttggaacggttttcgatatatcacaaacagattgtcccttggaggattatccgaaatttttgggactgggttataacaacgagcagcatgccgcaatctataaagtggtatgcggttacagcacgaatattggcctgccggtgacggaaaccgatatgaaatccgttgcgctgcggggagattatgatccggaatcgcatgcgatccggatcaattctattttaggggatacacagaagctgagtaccctgctgcatgagatgtcgcacggcttgcttgcacaacggtctgagggaaaaagcacagcagagagagagctggaggcggatttgctgtctgtcatgttctgcaaccgatttggcattgaggttacggatgcgcggaaagcgcacatggtcagcagctttagagaatttgaggcggagcaggcaaagacggaaaagccagtggagcttgtcagacttatagaatcagccgactggctttacacgcggaacgaagctgcgttgcagcaagcgctggaagccgccggcatacaaccgctggcagagcaagtgatgcccgttgcttcacgatctccggagcttctcgaagcagaacgcgcgcctgcgcgtagaagaagggaaccggagctttcgtctcagcctacaaaccaaagcgaaaaaaggcggcaaggcggaaaccgcagaggtatttctaaggagactgtcgatgaaataaaaagccgggtgagccttttagacatcgcgcgggaaagaatgcagcttacaaaaaggggtggcaactacgtcggttgctgcccctttcacaatgaaaaaacgccgtcgtttacagtgtatacgggaaacgattccttctactgctacggctgcggcgagggtggagacgccatcacattcatccgcaagctggataacttgtcctatccggaggctgtccagcagctcgctgaacgtgccggcataagtatttcgagcgaggacatcagtgcgtcgcaggccgaaaaggagctgcaaaaccgtatccgggaatgtaatcgcgaagcagcccgctactacttccagacgcttacaaaagcgcctgaagggagcaccgcgaggaagtatttgatgggcgagcggcagatggcggagagcagtatccggcattttggcctcggctatgcgacaaatgatttttttaagctggtcaatcatctgcggaagatgggctttacagatgaggaaatgatcgcggccaatttagctttccaaagcaaggccgggcgcatcatagaccggttccgcgagcgaattatgttcccgattttcgatgcgtccggcaacgtgattggctttggtggccgtgcgctcggcgatgaaaaaccgaagtatctgaacaccaacaccacaccggttttccagaaatcgaatgagcttttcgcactgaatttcgcgcgcaagagcagaccggagcagctaattttggctgagggatacatggacgtcatcgcgctgcacgcggcgggatttacaactgcggtcgcgtcgttgggcacagcgctcacagagcagcacggaaggacgcttgcccgatacgcaaaggaagttatcatttgctacgacagcgatacagccggacagaaagcaacgctcaaggctatctctgtgctgcgcgcgaacggcgtcaaggtcaaggtcgcccagattccggacgcaaaagacccggacgagtttttaaagcgttatccgcaggatggacaggaacggctgcaagcgatcttcaacgcggcgccgaacgatacggaatatcgtctcatgcagtgcaaaaacggattggatgtggagacgccggctgggaaacttgcctacatggaggccgcagtcggtgtgcttgcatcgctttcggatgcggtcgagcgagatatttacgcagatttattgtcgcgcaaaaccggcataagcaaagagagtatattgcagcaaaccggtattgagcgcgtggaaaaccggaactcggttccggtttcagaagaagaaccgatgtcggaggacgaaccgacgcggcgctttcgtgcgtggatccgtccggatatgaacgaggagagctccatcgtcgcgtgggcggacgtcgtgatcaacgaggattttcgcgtcaactcgatccggttagtgctggaggaggacaacacattttcgctcttgatgcccgcgtataagccgcgcggaaaagatgaatttgttccgctggttgaaatggatcccggcgcggagcacgagctgacgcaatttctcacgcagaatctggacatgacaaaggcggttgaagttgtcggcggaggcacggccatcgacgttggcgagacgaaaatggagctgcataagacgtacagccgcggaagtgtactggcgtatattgatatggaaaatagcgtgttgaagctcaaagcagcaaagatcatcgaaggtaagaggggcgtttttcttgcaacgccggataccggaaagatcaaaaccggagacgggcaagagcagtaccgatacgtgtatgaactcgcatcggcatctgcaaagtctgcggcgacgacagcagcaaagcaagcctacagccggatgcaggctcaaaatgaacgtgtgagctacgcgaaatttaagacaaaagaggtgtgatatgccgacgatcatcttgataaccggcgtcaccggcgttggaaaaacgacctttgccggggtactggaaggcttaaaaattctgccggaatatagcttgacgccgggaaaaattgcaaaaacccgaaagatttcggagcagaaagccgtactggagcttgtaaaagagcagcgcggcttttgttatgaaatgaagctgatcaatcaggaaatgcgggatttctttgagaaggttgatggcagaggatacacgatcctctgccattacatcggccttgagaccgacacggaatcgatcgtgcgcgcagcccggcgtgctgccgagcttggaaaagaaccggaaccggcgacgatgatttcgggtgagtaccgcatgattccggagcacatcaagctgctggccgacaaggtttcccgcattcagttttgggataactcgcgtggctttcgcgtcgtaggggactacggcgaagggcggctaagcctgcccgccggagaaaaaatcccgaagtggatgcaggaaatttgcgggctgatcgatccgcagccgcagaaatcaaggggcaaaattgattggaacgcaccgttgtttggtggagaaaggacgaaagaggatgaagaaaaaccagcagggaaaccgtctggagctgagcgtctccctatcgctaagcccggaaaaacgaaaggccatcgagatgtacagcgacggctttttgtcagagttgcaggaagaagttcagaaggcggcggagaaaattttgagccagacatacagcaggaaggttccgaaagtgatccgggattacgttgaacgctgcgagaagctggaagaaaagctggagcagaacgattgaaaggtgcggcggcttctgcgtcgctgcgcgcgaaatcttgggcagacgggggtatgcttttttgctttgcaagcaaaaaatcttgcgcggcgtaagacgcgccgaaaacggaaatcgcagaatgcgattttctgttttcctttggcaagcataccattcgtacggacgaatggtgaacagcgaaaaaatcgctgttttttagggacaccctaaaacccgtggtaactccaaaaataggttgatatataatctgaattgtgatagaattgaggtgaaaaatggaaaggataattcgaattgcgcagcatataacgattgcactgtggggcttagttgttttaacagtgacgatttgcatagttgcgtataagagtgacactatggaaggtttttttgatagcacgatttgggatattcttatcggtcttgtctcgtccgcggtaacaagcttgattgccactgttatcatgtatttcgcttttcttcgaaaaattccggagcaaacgagagacaagatagataagttgctgaatgatcgattaaattatgaaacgacaaatcataatgcagtggtgacatcgttaaactcgaattcccaacataatacgctggagcataaagatctctctagagagcatacggaaataaaaatgtctatattggagacaacaaatattctccgagaagatcgtgcggtaaaggcagaacgagaaaagcatatgaccggaagtcagaaggagattcaggggcatgtagatggcattcagactttagcggatgttatgggaaagcagcagatgagaatcgcacaactaaaaaaagagctaacgcaggtaaaaatccagaatcgtgagcttagggaagaactcgaacgggtacaaactcctaatatacggcgtcaccacagcttcgaaatggaaagataaaattatttaatgaaaagcgtctgaatgcaggcgcttttttctttgtaggaaggaggctggaatgcaaaaaggtgaaaagaaatatccaaagcgcgttgaggtgaagatggacaatgcgcagttcgaaaagctcggaatcctttctaaaaaagccgggctaacaaaatccgcgtacatccgccggatgattgacggtgtggtgccgcaggaacgtccgccgtatgacttctataagatactgacgcagatgcggtatatcagcaactctatgaaccagcttgctaagaaagccaacgcaaccggccatgtggacgcagaaaagatttcacttctcgcggagcagtttaagccgctggcctcccaactgtacctttacgtcaccttgccggtcaagcgcagtaaggatacagaaatactggccgagtattttaagaaggaaggcggatagatggcggtcacaaaaatttggaagattgaaggctggcttggggattccctgatctatatcgaaaaccccgagaaaactcgcaaccctatggttgtcggtaatcccaatctggaaaagtcacagtatcaggccatggacgacgttattgaatatgcaagtaatgacgacggcgaatatcacggtatggaaagatttgtcacaggcgtgaattgcagtgcggacacagcgcgtgcggaaatgatcgcaacgaaggaagcgttcggaaaaaatgacagcatctgcggataccacggtatccagagctttatgcccggcgaggttacaccagagatcgcgcacgagatcggcgtgaagctcgcacagaaaatgtggggcgatcattttcagatcgtggtcgcgacgcatctggatcacgaccacatacataatcacttcatcgtaaactccgttgcattcacggatgggcatcggctatggaaggagaaaaactactggaagatgcgcgcacaatcggacgagctttgtcgggagtatgggctgtcgatcacggtgcccaaaaatcgcggcaagcagtatgcagagtggaaggctgaacgggaaaagaacccaacgcagcgctcgcttctccgaaaggatattgaccggattttgctttcggcgcgcagcttgccggagttttacgataagctgcaggaggctgggtacacggtgaacacagaacacaagtatgtgacgattcggcctccgggtgcagagcggaatatccggctgcaatctcttggcgaggcgtatacggaagaagcgctgtacctgcggatccttaaaaataggattcggccacagtacgcagcgtatgtggaaccgtgcaggatcaagcgcgtgcgcgggaagctcccccacaagaaagcacatggcatgaaggcgctttactacaagtggctctattatctgggcgtctttggaaaacgaaaaccccagctcgatagcagcgcttttgttacagagcgccgacgcctcgatggatacattcggcagatgaactatatcagcgaacataatctgcggagcatattggacattgacgcccggcgcacggtggtgctggaagaaatcgcgggatacgttaagctgcgggacgagctgcgcaagcagatccgcgggaaatcgtatgaagatcctgcggtgatgcctgtgctggaaaagatcgtggcgctcaacaagacgctgaaagaaaagagatccgaggttcgcttatgcgagcagatcaaggaatggcggcaaaagattataaagcaaatccgggccgcgaatgaataccggagctttgagaggagagacatacaagatggacgaacaagcgattatagccctgagtatcgaaggaaccaagttcctccttcgagggagcaaggaaattctggcggggttagtggccctgatccgatacagctcagataagctgatcccggcacgaaaatgccgggactttttgttgagcacaactaacgtgcgattcctgtcgatggacgacgcgaatatcgaaagattcaagatggttgcaaaaccgtatggcttgagttttctgcatatccatgacagcaacggcgatgggctttccaccgttatggtgcgcggggaggacgccgcaatcatcaaccgtctgatccgacgcaacggccttgccattgtgaccgatgtgacgcaggaggagatcgaagctgatcctgaacgggcggcggaggtcaacgagccaatatcggaagtcgttgtggataaggatggcgtccgcgtgcaggacgccgtgaaagaatccagatccagcgcgcaggaaatgatggagggcgtcgaagctgcaaaccctacgacgggacggacggcggagaatcaaggcgttccgtccatgaaaaacttacaattttcggagagaacgcaagaagaatgggaggatgtgacggcgtcgattgacaggagctttgaggagatggtggaagaaaaacgccagagaaagctggagctgtataatcaggacgacccattgctcggcaaagcgggtgcagcgaaaacggtacaaacaaagccttctgtaaagcaggcgcttgacagaaagcaggagattgtaaagagcatcaagcaggagcgcgtgaaatcggcgctcgagaaacaggcggctgtacggggtacagtgcagagaacgatacagagatagaggtgaagggcattgcgcgcagtagaagcgggagcactggaacggctcccatgggatgaatcggataatcctgattttgtaatggatgcggaatcggaagctgccccggtgtctgccgaggcgtgggaaccggaaccgggttccggttcggagcaggaaaagctgctggatcagaagccgcagcttagtttccggatcaagagggtacgaaggacgggaaaaacggaaagagagcaggccgcaatcaatatgcgctgggagaaagcgcaggacaggatgttcttggagaaagagtttctaacgacggtactgaaggtcatggcaaatttcaattttgaagcgcgaaatgtgatcttgaccgccgcgcagcggcctacggccagtcggctggccacacagtcctcgtggcgtggtatcggtgtagaggtactggaaaagtgcctgaaaaatccggtgtggctttacagcgaggcaaagcacgcgcagccgattaagttctacgatattacgcagacaaacggcgaggagatctacacggcgcatcagacgatttacaatgcgaaggctgtcgtccggattgcgatgagcctgctcgatgatctgaaaatcatctataaggatgatgcggagggcatagagttttccattgatccgagagcctttattgcaccggcgggggcgatgaagaatttcgaggcactctttttcgaagcgatcaaggcgctgtctcagcgggacatcgttctatgcgaggaaagagagctaacggataggacgcggtatattgcggaggcttctgcgttcgttgtctgccggtactttgacatgctgccacaggggaaacaggttcttttgccggacgccatacgcagcgatgagatggacggtattgtggacgacctcgactgtgcgcgccgcattgcaaggcactacatcgagacgatttgcgatcgcctgcgttcaaagaaatggagggaggccaaatgaaccggcggggacgcgattataccgggttttggatcatggctgctgtcggggctgtatttgtcctgtggttcggtgttctcattgcaccgtatgccgatggagggcttccacgtatcctagcgcatatcggatcggcgatcgaccatccctttgacctgcagatctgcgcgaataccggcacatcaatccttgtgtgtatgttgatctatctatttgctctggccattgcgtttaatccgaaaaattaccggcatggcgaagaacacggctctgctcgatggggatctgcgcgtgaactgaatcggagactgagtaacaaagagaatctggatgaaaaccgaattctgtcagagcacgtcaggattaccacggatcagaggaagctgaacaaaaacctgatttcattggtgatcggcggttcaggctcgcgaaaatcgcgcggctatgtgatgccgaacctgctacagtgcaattcttcctttgttgtacccgatccaaaaggcgagctgctgcgcaatacaggtaatgcgcttgagcacgaaggatataaggttcgcgtctttgatctcatcgaaatgcggaaatcgtttcgatacaatccgtttcggtatttcagagatgacaatgatattcagaagttcgtgacaagcattttcctgaatactgaagataagacgaagcacggcggtgatcaattttgggacgatacagccaagctgatgttatccgccatgatgtaccttgtatggtacgagtgtgtggaggaagaaatgaatttaggtacggtcatggatctgattattgcggaagatgtgcccgatgcagaagatggtgaagtcacggatattccgagtccgacgcagcttgtctttgaggatctgcgcagaaaaaatccaaaacacattgcagtacaattttttgatgcataccgaaaaggcgcaggtaagactataaaaagttttcaggaatcacttctcagccgtttaggaaggcttctcattgacgatgtcagaaatcttgtgaccggggacgaaatggagatcgagtcactatgtgaagaaaaaacggcgatcttcattcggatgccggataatgattcgtcctttaacttcctcgcatcagctctcataacacagatcttccagcttttgatgcacatagcggacataaaatacaaggaccggggcggctgtttgccgatcccggtgcatttcatgctggaggaattcgcgaatattacgatgccggatgattttcagaagtggatcggcacgatccgctcgcgcggcattacggtttcgatgatcctccagaacatagcgcagggaaaaaagatcttcccgaatgactgggaatctgtattcggtatgtgcgacgaaattgtatatctcggcggaaacgagccgaatacgcacaagtggatttcggatatgctggggcaggaaactgtggacaccgtctcctatggcacatcgcgcggcaggtcgggtggatcaagtaaaaacgagcaaaataccggtcgatcgctgttggatccagcagaagtgcggctgaaaaacaggttgctgcacagcccgcttggcaatgtcattctgattctggcagatgaaatgccggtgatcgataccaaatacgatctgaagaagcacccgcgttatcgccttacagcggacagtggcgcaccgatttacgactatgcgccggatgacgacggcttttttacaccgggaacggcggtctatatcaacgagccggatatttcagaggatgatattgccggtgaattcacctttgacccgaaagctgtaatccgggttccgatccgccagcgtccgccgaaaacaaatcagaagggaaagaaaagaaaatgagaattaaaaagcaaacgtccagacagatctgtattttcctcagcgtcctgttgggcgcttttatttttgccccaatgtgctttgcggccgaatttaccggccttccggagatcgacaacattttcaaccagcttttctcactattattcggtatcctgcgcgctgtgggtgcggtgcttttgatatatgggcttgttcaatttgcacaatcctttcaggcgcatgatacgacagcgaggatttcaggaatattgatgatagcgggcggcttgattgtctgcttcctgcgggaaattctggcttttatgggcattgtggtttgagacggcaagatgaggaaaggggggagcatacgtgtatgaaccgatattgtcctttttgcgggaaattttcagcctgatgtatatggtcttgacggaggatattaaaaccttttcccctaatgcgtataacgtgctgtccattttgtcatcttcgcttgttggcgtaggtatcgcaatcactttggtttctttcctgcttgcagaggcagatgcgtctgtgatgctggctgagcataaatctatcgttagtatgctgaaggtgatactgaagctggggattgttttgaccctcgtaacgcacagtgtggagggtcttttgcttccggcgtttgcaatggtgcgggaactgatcgccggcctatttgcggccgtggggatggggccggacagcgactatcttcaagggctgaccggatatttcgatgcgaatgctgcaaatccctttgagtggtcgctgaactccatgttcagcttcaatatctacacgctgatcttctctattgcagccgtcgtttcaggcgtagtcctgctgttgaccgtgatcggccggttcctgaaaatctatgtttacatgtgctttgcgccggtagcgcttgcattttttgccggaagtcagggaatcagccgatacgggcaaaattacttgacaaatgcgctggccgttgttgcggagggccttactatttccgtgtgtctgctcctgtttcaggcaatcatcggcgatgcggcgctcatgcagcggatcgaccagcttttcagctttctcggcgaaatggcaaagcccggccttgtcgtgctgttcctcggcagtctgggcgcaatggtaaaaggggcagacacattgacgcataagctgttagggttttcttaaaaggaggctgccgtgcaaattaaagtgaatatggaaataagagatatagaaaatgagcttgcttttgggttgacgcctcgaaagctggtcactacaattttgatttttattgttgttgtaccactctatacgacgctggcccggaaaatcacgatggatgcagcagcggtgacggccgtcttagcagggggaataattggagtggctggttttgggaaatggcatgaaatgcacatggagcaggctgtattgtactggctgcacacacttctctgcccaaagcagcttgtgttccgaggtgtaaatgtatatgacgatgaaatacaggcagtatgcaaggcaaaggaatctgccggaaaggaaataacccgtgttatacaaaaagacattgatacaagcgaagcggccgccgaaggggctgcttcagataccgcgccggacgcaggatctgatcccggtcaagcgggtctatgaggacggtgttttcgaggatgcagagggatatttttctaagacctttctgcttctggacatcaattatacggagctgcaagacagcgagaaggaacaaagcctaatcaactactcgatgctgctcaattcgatcgacaagggggcgcggtgtaagctcacggtggcgttccgcccaatcgacgaagcgcagtttgagcgtgacgttctgcttccaacgaccccgaaggatgggctggacgattaccgcagggtgatgaacgatgtgcttctggcacaggcgcagggaagtctgggcatgcagaagcggatttttctgacgatcgcagagcagagaaagagctatgcggaagctgcctccttctttgcgcgtctggagggatcgatccagaacggcgtaaagcagatccggtctgaaatcgagccggtatccctgtccgagcggatgcggtttttgcacgacgtttaccgtcccgggctggagcatatgtaccggttcgatccgaatgcagccaaacgcaccggaatgagctttaaagacgccattgcgccgttggccgcggaggatctcaactccatcgaccacctgaagctcggcggccggtattgcaggagcctgtttttgaacgaatatcccacatatctggacgaccgcatcctgtccgagctgtcctcagtcggaaagtccatgattatttccgtggatttcgagccgatcccattggatgaggcgaaggctgaggcggagagccgtgcatttgcgattgaaacgaagattgtcagctacaatctccggcagcagagaaataaaaactacagtgggatggttccttacaatctgacgcagcaggcggaaagtgcaaaagaagtcctgcgggatatacaggaacgcgaccagaacctgtatctcacgacggttacggtcacacattttgcagattcgctcaaggagctggatcaggacacggacagtattatgagccggggaaaatcgatctcctgccagttcctgcccttaacggcgcagcagctccacgggctaaacacagtgctgccctatggccgcccgtacatacaggcagaccggcttttgacaacacaagcgctggccggaatatgcccgttcgcggcgcgggagatctatcatccgggcgggagctggctgggccggaacgcgacgacaaagcacctcatcgtaatgaaccgggaggtgctgccgagcggcaatgccgttgttatggctccaaccgggacgggcaaatcctttcatatcaaggaggaggctgtccaaatcattttgcgcggcggcgccgatgtgatctttctggatccggagggcgagtatgtgccgctgacggaagcgcttggcggcactgtaattaccctgtcgatgacctccccgcacagaatgaatccctttgacatcgatccggaggaggaagatcgctatacggataagcccttcaaagagaagctcagcttcatatgggcgctttgtcagggcgttatggaggagaacggcagctatctggacgggcagctcaagtcgatcatcgaccggtgtgcaaagcgcatttttacaccgatgatccattccggctacagaaaacccgcgcccctgctcaacgatctgcggctggagcttttaaagcagaaagaacctcgcgcgcaggagctggcgctcaatttggagatgtatacggtaggttccttcaacatgttttcctgcccgaccaatgtggacacggcggcgcacgttgtgacctacgacctgtcgaggctcagcgagtatatgcggccgtttgctgaaaaggtgctgccggagtacattacggagcgcatgacggccaatttccgaaagggaataccgacctacgtgttctgcgacgaaatcatccagttttttgaaaatccggcgtctgcgcagtatttcgggcgtctctcccagcgcatccgcaagcgcggcggctttttaagcggtatttttcagaatgtctcacaggttatggagaatgaagaagcgcggaagctggtgctgaactcctcgatcgtcacgatgctcagtcaatcgcctacagaccttgagatgctggccgacatgtttcacctttcggatgcacagcagcagatgctgtcgcagcagcgcaccggctcgggcctgatcaagatcgggagcacgatcgtttcctttgagaatgcgtttccgacagacaacatgctgtacaagctgatgacgacgaggccaactgacagatgggggcaaaatgaagatcaggacgtatgagaactcggtacgacacggcgtgatcgatacgctgaagctcgaggatcgggtgaaggatatatcgtctcaggtacaggactcgcagcgcatcgtgacagcacccgcgttgtccggcagacggacggccggagagaacgagagcgcagaggctgtggccgcagataacgccgtaaatggtgcaaaatcgtttgcaggggcgttccgcgacttcgctgggaatgagatcaaacgggcgctgaaaagaacgcctgtgcgcacagatgcggcaaatgcgatgcggcgtgcagtgagtacagggggaaggacgccaaggggcgatctgaaccggcggacgctgcgcgttatcaaagggaatgccgggcagactgtgaagtctcacgccgcagggcaggccgtatcgggagccgctgtgcgcggcgtagaaaagacagcggtgcagggcgtccgcattgctgcgcaaacgacggctgcggcggggacagcggcaaagacggcggtttccgctggtgccggtgccgctacagccggtacaagcacggctgtgcaggccgctgcggaggcagcgaaaaaggccgcggtcggtccggtcaagatgatgcaggagagcgccgcggccgcatcgagagcgtctccgctgcaggcggccgatatggcccgggcggcgcagaccgcgcaggaagcagcggagagcttcggggaaaaggcacagccgaagggatggacgaagtttgcttttgcgattgccggtattacactgacgctttacatgatgcttgccggtgttatgacgagcactggctacggtcgggctgtaaacctgaatgaacgggtagaatcctaccgcccctcggtgcagaaatgggccgcgaaatttggaattccggaatatgtcgaagttcttctcgcgttgtgtatggcggaaaccggtatcctcgaaaaccccggtgatccgtttgcatgttctgaatccggccttgcggtgaagcagccggatgggatcacggatccggagtacagcatcgagatcggggtttattgtttctcactcaaggttaaaaaagcaaaatgcgcttcgccagcagatcggaacgggctgttcaaggcgttgcaggcatacaacatgggcgatggctttatagatttctgcgacacgtattatggcgggatctggtctgtcgagtgcgcgcaggcgttttccgataaaatgggacaaggcggagtttacggcaatccgaactacatcgagcagtttttgcgctgctacgagtttgggacggttacatcgacgccagatttctccggtgccttgaacgccgccggattgtgctggccgctcggggacgccgggcaggacagtatcacccagcacttcggcggcatgtacagcggtgagccgcataaggggctggacatcggcatgccggagggtacgccgatctatgcggcggcggacggcgaggtgattatcgcgaacgactatgattcgtgggggtatagctggggctactatgttaagatcaaccattcaagcctccacgacacgctgtacgcgcacatgagccgtgtcgccgtgcgcgaaggacagtatgtgcgacagggcgagctgatcggctatgtcggtaataccggcaactcgtccggcccgcacctgcactttgaattgtatttaaatggaacgcgcgtcgatcccgagccgtacatcgggacagacgcgctgcaaaaatatctgcttacaaatgcttaaggaggaatttacatgacagccagaaaacttgtgatccttttgtccgcagttctcgcggtcttatttgggatggtgatcttcgcctatgtccggatcaacgggcatgaaacacagcttgccgcgcagacggaagcgatcgcggcgatgcaggaaagcctgaatacgcagaaaaatgaagaagtacaggagccggaggctacaccggaaccggttgtgtatgtcgtaagtccggttacagcctttgacgcctacacggttgaagctgcgccgtatttcacgctgccggaagcagagagtgaaccggcgggaacgctggagaccggcagcaacgcggtagtatccggcgtctgcggcgatttctactacgtgacgctgccggagggaacggcctgctatatcccgcagcagtatcttgcgcagactgcgacgccgacgccagaacctacaccggaggcaaccccagtgccggaggtgacgccggagccggaagctgacgcagaatccacagcagaataaatgatgttgttacttactccataaaaaggaaagcgcctgagcagttgcagtgctcagacgcttcgtgtccttccctataaataagaaaggaatacccatatgaaatattatatatcctccgatcttagtttgtcaatgctttcggtacgagctttaaaactttttaatttcttgcaggccaaagccaacgggaaaacaaacagctctttctggtctgtgccgcgcatggcgcaggaaatggggctttctgaacgtacagtgcagcgtgcgtcgcaggagcttgtgcggaaagccttcgtggagatcattccccggtacgatgaaaacgggcgtcagcagagcaacatttacaagatcgtcgttccgcaggagctgccgcatgaggcgaatacatttactgacgacgtagatcagctcaagggcagagaactacaggtctatatgtacatacgccgcagatgcgggagcaggggctatagggtcagccgtcaggagatcgctgcggagctgaatatcagccgttctacggtatcgcgcataacgcgcaggctcgccgccggcggatggatcgataaagcatatgcgggccgtccgtttggaggcggacggggctggaaccgatatgcgataagccgcatccgcatgaatgcgcggtgcaggattatcttctgccgccttgttctgcaagctgccgcgcaggagacagcacattttgctgcccgtatttcatttggagttggtaagtctgtcacccctttaacgaagctcaagggtataataaagaacttgctaaacaagggcgtaatagggataaaatatttcctgaaagctatgtgtaggagagaagaacagaaacgcgggcttgtggaaaatggagtgctccgggggaaggtgcgcgcatttttcaacagatacggagggaatacgtgtgcgccgccggaaaagcagccgggcgcgccgccccccttccgctctgtccagcaaattctcagcgcccggcagggcgcgcaaaatacttgaaatgttcgggcgcatcgggtatcataaaaccatagagcctgagcgggagggaaaaacagaatggtaaacgtgatctatgccgcgcatcggaagggcggcagggaatatatctggcgtatcccggaaaacatgcaggtcaatgtgcaggattgggccgttgtgcggacgcagtacggaatctgcatcgtgcaggttcagcgtctcggagaggtggacgatgcagaggcggagaagctcgaatctgttttgcaggcagtttcggatcgggccatgctcccggtgccggagccgaagaaaaagagcagcagcgcgcggaaacgcaggaaaagagcggccagagcagccgaaaaggagaaaaagcgctgggcggagagcggcatggacatcaccccgtactggaacaagggcttcacgacgccgcagctcgacgagatccgcaaagggctgctgatcggtatagatgtttcccagtacgccgacccgtcgctcctgccgggcaagatgaagaaaaaacgctgggcgatgatccgcccgctggcgaagttcatgggatacctgccggatggactgagcaaggaacaggcaaaggaaattctgctcggcattgaaagccgcgtcgatgtaaagcagtacgcggatccgtcgctgaactggaagatgatgcgtctgctgcggcgctgcatggaagcagatttagatggggcggagctgaaaggaaagacgcacaaagagcttgccgcgtgcctgcgcgcgcagacggataccggggcgggaaaagctgccggtgcggaggcaaaagcggaaccgggttccgtttccgagccgacagtgggaaaaacggaacccggttccgaaaatgcgaagccagtccaccggcgcggcgaagcggagagcatcatccgggcctatcaggccgcgcatccgcaggcgacgcggaatgagacggcccgggctaccggatatacatgggcgacggtcaataaattctggagcaaggaggagaaatcatgctgaatttgaacggtgaactgatgtccggtgatcatgctatcgcggtgatccggaacggtttgctacaggattgcgacgacgcccgtctgccgtattatctcaagcggacacaggatttacaggggtggcttgagctgcgtgccgtagaccggcataggccgaattcacggctgcttcggaggctgtaccggctgggcgacgccgaggatgcggaaattgcgctgcgcgcctctgccgtcacaattacggataatttttggattcggcgggagggttcctcagaaacgtatgaggacgtccggttcaaggagaacctgttcgcggatgttgcgttagagggaaagctggacgccttctcggatgggcgctggcggcatccgtcctcctctccggagctgactaatgtcggcagctttgaaaagtgctggcgctttgagaacggcgcgtggtggatgtataagcgcggagacgaatccgagcaattcgccgagctgttcatcgcggctgtgaccgagcagctcgggtatgccggcacggcgtattacttgacgtctaccggggtgaagtcaaaggatttcacggaaaacggcagatataactttgacccggcggttggctttataggcgatcgttatgacgattacgtgtattgctacgaaaagctgcaagcgttcggacagcactttgcggacgactatgtgaagctcctgtacgtggatgcaatctgccgcaatgtagaccggcactccgggaacttcgggatactgcgcgacccggataccggtgaagcagtccgccttgcgccaaactacgacaacaacatcgcgctgtttgcgcggctgagcggtacggcgtcgatcagcgcgaaaaaggacatgctgatcacggatttcctcgatctgatcgagcaaaagggcattgcttttgaactgccgcagctttcccggcggacgctctcggagctggccgaaagcgctccggtaaaggatgcctccgggatggccgtggatttcgtgtattcccggcagaacatgattgcggaggagcttgaaaagatcagggcgcagaatcttccgaaaagggaaatccgagaaacggaaaagcggctggcaggtttgaatcgaaaaatgcaggatacgacctcagtgcgggaaaagctagagcttggtcagcagatgcaggcagagcagaaaaggctggagggcctgaaaaggcagaacgccccggaaagaggaaagctgaaacacagttccagagaaaaataggtgtaacgggcttgcgggccaaaccggaacccggtttcgctttggatcaggaggcatggagagatgaaaaagtacgcagtcggagatacggtctatatccttgagagccgtcgggacatacggatgggacaggtgatccacatatccggggatctgtacaccatccggtttgactattcaagtgcaatccgggtgcatgaaagccgtctttttgcttcggcggaagatgcggcaaagcagatcccggagtatctgcggatcggtcataaggacgacaaaggagcgggacaccggcggttcgggtagaaaaccggaactcggttccggttttcatgggaatcaatcgtagaagggaaaagaatatatggacaatgataaattgcagctttttgaaaacaagacgatacggactgcgtgggatgaagaaaccgaagaatggtatttctccgttgtggacgttgttgcggttttgactgaacagaaaacacagcgcggagcaagcaactattgggcgaaattaaagcagcgtttaaaagaagagggagcggatcaactgctgacaaattgtcagcagttgaaaatgaccgccactgatggaaaaaaacgattgacagatgtcgcaacaacagagcagcttctgcgcatcatccagtccattccgtctccaaaggctgaaccgtttaagctgtggcttgcagaggtaggtcgtgagcgtatcgaagaaacgattgatccggagcaggccattgaccgggcactggaaacctatttgaaaaagggctattccgaggaatgggtgcaccagcgtgttctggcaatccgcatccgaaatgaattgacggatgaatggaaaaaacgcgggttggagaaaggcaaggagtttgcgattctcacggatgagatttcccgcgcatggtcgggaatgacgacacgtcagtacaaaagactgaaaggcttgaagaaagaaaatctccgcgacaacatgagcgatctggaacttgtgcttacgatgcttgcggaggcttcgaccagagatatatctcaagcagagaagccggaaggatttgctgaaaatcaggctgtagcccggcgcggtggaaatgttgccggcgtagccagaaaagcattggaggcagaaacaggaaagcctgttattacctcgcagaacgcggctgattttgcccaacttgtcggagatgttgtcgaggaagctgcacagctacctgaacaccgcgagaagaaagacgataaagaaagttgattacatatccttaaagagcagaaaagcggaactgagttccggttctgaacatttcagtgtgcaaaaaggtacacctttttgcacactgtttttttattaacaaaaatgtccagaaaggtgtaaaagttaatttccggacatgtgcaaaaacatttgaacctttttagacactttggagggaattatgggcagtaagacatggggatatgcgagagtatccagcaaggagcagaatttagaccgtcagctggaagcgttccgcagcatagggttatcagacagggagatcattgtagataaggccagcggggcgacgctggaacgccccggttatcaggcgctgcggaatcagctcttgcgcagcgaggatacgttggtggtaaaatccctagaccggctgagccgtaataagcagcatatccgacgggaactggaatacttccgcgcgcagcacattcgcgtcatggtgatggacatcccgacaacgatggtcaatctgccggaagggcaggaatggattatggatatggtcaataacgtgctgatcgaggtgctggccagcattgccgaacaggagcggagggagatcaaggagcggcaggcagaggggattgcggccgcaaagaaaaagggcaagtccctcggcaggccggagatcggctatccggcaaactgggaagctgtgtatgcgcggtggagggaaagacgcatgactgcggtgaaagctgccggggagttgggagtaaagcgaagcacgttttataacctagtcaggaaatgggaaaaccggaactgagttccggtttttgtcttttcaggaagctgccggttatgctataataagcacacaaaggaggttcatgttatgacacagtatgaaaaagccgtagcgctttggcagcaaaagaacatcaaaaatgatgcggagcttgctgaagccctgaacggccacagcatcacgtttgcctatcattcgggcaaaattgagaatgacaggattacctatcacgataccagagaaatttttgaacatgacggcgtaacctcctatacgggtgatctccgcactctttttgagatccgtaacgcaaaggaggcaaacgagctgtttctggcgtcgttcggcgcaaggcgtccgctggatgcaaggctgatctgcgaatttcagaagaaactgacgcagaacacctacgatacccggcgataccagctcggcgaaaggccgggaacctacaagctgcacgattacgtgacgggccgcgaggaaatcggcgcttcggcagaggacgttgcggaagaaatgaacgagctgctttcggaactctcggatattcccgataagaatgcgatgacggctgcggcgtacttccatgccaagtttgagaatatccatccgtttgcggatgggaacggcagaaccgggcggctggctatgaactatttccttgtgctgcataatcacccgccggtcatcatccatgaggaaaaccgcagggcatattatgaagcgcttgaagcatgggacagctttcaggagatcgaaccgctccgtgatttcctccgctgtgaggcggaaaagacatgggaaaagcagattgccagggtagagcgatgccgaaaaaagggaagagacaaaggactttagttgtttcacgaaaggggaaatggaaatatgcaagcggatagttttaagcattggattgaccttgaaagagcgggaaacaattttgatttgacggattatttgccttctggtccatgtgcggtttttcattacaccagtccggatgcctttttgtccattatgaatgatggaaagctgcgattcacagatagaaattacttgaatgatacaagtgaaggcaaatacatatttgacttgtgtcttgaaaattctaagacaatctgtgagggatatgaagcgtatgagcagggctttgtcggagcttgtatggaaatgaaaagtcgttttgaggaaatcagattggtataccaatgttctttttcaactgatccagacagtttatgtctttggaattattatacccgtggaaattcaattcaaggatatagcttaggatttagtgggaattctcttttttcttccctcgtaaataatggaaagtatcatgtgaatatgggaaaagtcgtatactcaaaagaaaagcaactcgaaattctcaggaaagcaacctgcttgttttttgagctgcataaaagaggaatcgacaaagagccccccatcccggagaggaaaatgttagaaatacttcaatataggttgtaccttctgggacatttctttaagcagaaatatttcgaggttgagaatgaattccgtataacgcttattgcacttactgcagcagatgattccaaaaaggaggaactgaatttctttaatcgcaacggagtcatggttccatatatagatgtttgtcttgaaccaagtgttctcaaaagtattcgcgtttctccaacgatgaatgggactagggcaaaagatggggcttttatgctgtcacgtaaaaaattcgatcaacttacaaaggcggatattatgatgtccaaaattccgttaaggtattaaatgtatttctgtcttgcttgcatttttgaaatcacaagcacttgttctaaggagaaaatatcgctggagagtcagcgcggaaacgtatagaattccatgcggacggcaattcaaaccaaaaagaggaaaataacatgaaaaaggatataacaccagcgccgctgcagcgggtaaagcactggaagcagactatgcccggcgtttacgacaagctggacgcgttgcaaaacctgaaaaaacgaggaacgattgagtggccggattactgtgagctgccgatcggcgttgcagcgtcgtatttgctggcggcggcacgctattcgccgatggatgcgtccgctgtggcggcggagcttacggcctgctggatgtggaggcgaaacaaagtcatctactccttcgaccgcgacttagccgctgccttggttgagcaggcagccgacatcaaggatacggataccttgccgacggatcttctttttaatctgccatatccgtgcatctacattcagacgccaatttctccgcttggggacaaatacgacggcttttgggtgtggatagaatatgactttaacacacagacaagcgagcttcgcattcagtggctactggcagacggaaaaaaatccataccttgtgtgctgcaccttgcgccgggcaaaacgcttaaagactgcaaggccgatacgatgcagaccatacagcagcatctcaacctgccagtccacttaccgagcactgcaaatctcgtcttggaacctttgcagcttgtgctctatttgctggcggaaaatgcggatgtgacgccgaaaagtacaacgccgactaaaagtgcaacgccaactcaagaaaaggaaccctcttccggaacgcctcgtattgtccgggatcagtacaaagagatcaagccaaacgatgtgggcgtttacattggcgctgcgctccgcaaggcgcggcaatcctccgaaagtgctgaaggtgcagccggatcagccggaaatagaggtggagcgggaaccccacggcgggcgcatcttcgccgaggccattggcaccactactggtacggctctaaaggggaaagacggctgaagctgaaatggacagctccaatggtcattcatgctgaacaaggcgaaattgggacagtcattgtaccggtgaaaccggagaagtaacagccggatacagtaaaagccctctgcgcagagaagcactgaagtgataaaataatggtagacacaaaagtgcctaccattatttttatgctattatagacatggaggtggcaatatggctggtaaatacacgatgcgaagcaaagaagaaaagttagctattgtaaagaggaatttagcaggagaaacttcaaggtcgctcgaaagagaaacaggatgcagtcatcggttaatacaagagtggaccagaaagtatctagcagaaggtgaagccgggctggaagttaagaagaaacccgggaatcctttatctcgttatgagcgccggaaggaactgacctacgaggagcagctgcaataccagatcgaactgctgaagcgagagctggttaagaaagaggcggaggtacttcgtttaaaaaaacggaacgaacgaaaagggggcgatgcccgaaaaagatgatccgagagatgtatgctgagattcaaaagcagacagacaaacattctgtcagcgaactttgcgaaatctacggtgtttctcgcagcggctactacaagtggttgaagcgagcaggacagttaaaccggtatgagaaaacacataaaatactggatagttatgtcctggacatccattcccaccacccaatgatgggataccgccagatcagggataagctgtaccttgaattcggttggatcgtcagtgatcctactgtttggaagtcaatgaagcgactgagaattcacggatacaccaggcgcaggaaagctgcggccacaggaaccaacttagaacacatccgctatgccaacgtactgaacagaaaattcaaagcagagaagccgatgcagaagattgtgacggatgttacttatatcaaacataacggcaagtggtattatcttgcaggctatttggatctgttcaacaacgagattctggaatgggaactcagcgatacttttgacaatttcctcgttatgaagccggcagagcgccttctgaaaagaaaaatgagcaccgaacaccaaatccttttgcacagcgaccaaggtgtccagtactcatccgcaggttattgtaacctgcttaaagaatacaatgtaattcaaagtatgtcaagggccggaaaccctcgcgataacgcagttatggaaagcttttgggggcgattcaaggacacgctgcgcaagcacttccgttactgggaatgtgatgatctgagatctaccattgagcaggcaatctactatttcaacaatgaacgacccgtccgcaaactaaaaggaaaaccaccagtcccgtatagaacagaactggtggcataagaaattttatgtctactaactattgactacttcagcgcagagaagcacagagggcttttttatatcaagcaattccaaaaacatcctctaaatcaatttgtccgagctcctgcgcgataagcaggcgtaaatagatgggacacgcgcttcggctctcccacccttttatcgtgttaagaggcacgataaagcggtttgaaaattctctctgtgttaatcggctctcagctcgaatttcggctatagaccgagtaagccttgcatgcagttgcatcaaaacattttttccagcatcaagatcatttggaacaaatcctttgatgtcctctgttaccggcatcaacagccagcggttcacaaagagttctgcattcatctcgtcagcagatcgaataatttcggacatctctgcataggtcataaaaaaacctccttcacattaaagttattgatccacggcgcgcaccggctgaaaaggccgatactgacagccccgtgcagttatcccaaccgccagtcctgcaagctctgtaaggccaagcaggtactaagctgccgttataatccaacttcatacctctcaatatgaatccattttcaacgtaaactctgtacccctgaatggtgtgccacccgtctttaattgcatttgtcatgttgaatagctcctctcgtttattgctagaacctgttggattcctgttgattatattatagtctattagacaccaaaagtcaagaggttttagaaaagtttttttcttttctggctgcaaaatctctgggatgatgtcaatgagctgtaaagccaggctgacagtaaaatgcagtgtatatcgtgaatgatttccacgcctctttttcgcgctcgctcaggaacatataatgaaattagaaggcagcattcggcgcctatttgagatttattttatagcgaagggattactcaagtttgagtaatccctttttgtttcagcttgtaaccggaggtgataataaaatcgcgccggataaaggatctgccgaaagaaataaaagtatggaggcgttcttaatggaaaagatgttggagacgataaccattggtgaatggacggatttttggctgaacaactatgcgcgggcgtcattgaaagaaaatacgctgaaaatatatcaggatgcccgacgtaggctttttcaagaatatcccgacatcgtttctaggccgcttagtggtcttacgacattggagtttgaaaagatcctgcttgagctgagtagcaaatacgcaaaatctacacttcggcacatgagaatactgatgaatcaagtgtataagacagcaaagaaggctggaaaatgtgtggttaatccaatcgcggaggcacaggttccgaaaggagccagagtaaaaattgttacgccgatgacaaaggaggaacaatccgcctttgaatcgcagcttggtattttatcggttccagatgatttttctctgcggatatttctgcttacggggctgaggcttgacgaattgcgattgcttagatggcgtgactggaacaaaaaagataacttgattttggttcgagaaagtaagacggaaagcggtattcggcgcgtgccgttgcttccggaggcagcttccatgctgaaaatcctcgcggccagaacgacgccggatccgcaggagtacatatttggagttggggatggacgcccggtttgtaaatcgcatttcaggcacatttgcaacaaggttacaaaggcagcgtctattcgccatgtgacgccgcatgtgctgcggcatacttttgcgacccggatgatcgaggccggtgtggatgcaaagagcttggcgatgattatagggcattcagatccgggatttacactgaaaacttatgtgaagccggatttcaaatatttagagaagcaaatgaggcgtttgctcgaagtgagggaaagcgcataagcaaaaagcccgagttctgaaaagaactcaggctttcatgcgaaatagacggacaaaaatgaataaaatgtgtcaaacaccttgacacaacacaaaaagaggaatacaatacatataaggattcccctttaagcagaatccaactggccttgtctgaagaaaccaacttcagcgcggcctgctcaggtgatacatacaatatcacggaagcatttgagaactctgaatatctcagatgtccttatgagtaatcataacacatctgctttttgagtgcaaggcttttgtcgatttttgttgtatcgcaaaccttgccttttttcatgccgtgaatttcggacatccgagaggagcggcacaaaaaattgaatagccacacaggtaagaatacaaagcctcaaagaacagttatgccatgaccgcatcccgcgcgagcgagccagcgtcaccaacgctgctaccctgcgaggtgggtaagatgacacatctgcgtttaagacccggtagcaacctctactgcttgaaccgaaatggttagcagcggcgctcaaccggaggaaaaggtaacctgtgcttgagtaaaactaaaacctttaaggaggaacagcgcagttatactacgctatttttccttaatcgatgcgcacagtaaagctgtgcgcatacattaaggaaaaaatatggggtgaatgatgggacttgaacccacggtctccagagccacaatctggcgctttagccaactaagctacatccaccatatggcgcgccaaaagggactcgaacccctgacctactgcttagaaggcagttgctctatccagctgagctattggcgcttatcgcaggcgccttcggcgctttgtcccttttccgggctggagcgggtgatgggaatcgaacccacacgaccagcttggaaggctgggattctaccattgaactacacccgcacaatttgcgacactaggaattatagcacagatgcttgtgcgcgtcaaccgcttttacagacttttttctgtttttttgcgcgcaaaatttttgtccggcaagacgcatgttgacaaaaacagtctcatatgatacgatattctggaaaccggaggtgctgcgggtctttgccgccgccattcggcgcagaaaggggtgtcggcgtggcggcagagcagaaaaccggaggggacgcattgcaggcggctttttccgaatgcccgctgttttccggcatggatgcctcggcctgcggcgcttttctgcgggtgtttcaccgcggcgaaacgatcagcgcggtgcaggacggcgtgccctgtgtcggcgtgctcgcgttcggcgaggcggacgtctacacgtgcggcgcggcgtccggcgcacagcagaatgtttcgacgctgcatcccggcagtgcgttcggcatctgcaacgtctttatagagcgcgatatgccgacgtacctgcactgcaaggtgcgcaccggcgtggcgtttctgccggcggcgcgctttacggcgctcctgcgggaggacggcgcgcttctgcggcgctatctgacgctctgcaacgagaaaatcctgtatcttgccgataagatcgatctgatgggtgtttccggctgctgcgcgcgtgtggcggcatatctgctgcgcgaggcggacgaaacgggtgcggtgcgcacctgcgtttccaaagagcagctcgcaaagtacctcagcgtgtcgcgggccagcctgttccgcgcgctcggcgagctcaccgcgcagggcgttatcgtgcaaaccgccgcaggctttcaaatactggatctatctgcgctcagccgcgcatgcggcggcgccggagaataaaattttgcggcggatgccgcagcggaaaggaatttacagctatgaagaaatttgcagccgttttactggcggctttgttctgtgtcgcgtcctttgcggcgtgcgcgcagagtggggggagtgaggcggcagagtcgtccgcgcaggctgcgcaggcgcccgagtcctccgcgccggaggaaagcgcggagagcgcagagggctccgacacggttggggtcaccgcagagccggcgagctatgcggtcgcgtccctgaagggcccgacgacgatgggcatggtcaagctgatgcaggacgctgaaaacggcgaaaccttcaacacctacgacgtggcgatgtacggcacggcggatgagatcaccgcgggcattgcgaacggtacaatcgatatcgcgaacgttccctgcaatcttgcctcggtcctctacaacaagacagagggcgcgatttccgtggcggcgatcaacacgctcggcgtcctgtacgtcgtggagaccggcgacacgatccagtcggttgaggatctgcgcggcaagacgatctactccaccggcaagggtacgacgccggaatacgcgctcaactatattttgaacgcgaacgggatcgacccggagaaggatgtgaccattgagtataaatctgagtcaaccgaggttgcggccgtgctcgcagacgccgaggatgccatcgcggttctgccccagccgtttgtcaccacggcgatgatgcagaacgaaaacctgcgcatcgcgctgagcctgacggacgagtgggatgccgtgcagggcgagggcggcagcacgcttgtcacaggcgtcacgatcgtccgcaacgcggtgctcgaggaaaatccgcaggcgttcgccgagtttatgaaggagtacgaggcctcgatcgcctacaccgagacgaacccggaggaagccgccgcgctgatcgccggctatgagatcgtgccgaaggagccggtcgcgctcaaggcgctgccttactgcaacatccgctttgtcgcgggcgacgagatgaaagcgaaggtttcgggctacctcgaggtgctctttgacgccgatccgaagtctgtcggcggcacgctgcccgacgacgcgttctactatgcgggctgagcggcgaaaaagtaaaaaacagcgggccacagccaccctttttgcggtggctttttggcttttcgtgtggcacgcggcgagcgcggcggtcggctccgagatcattttggtgtcgccgctcggcgttttgcgcacgctcgtctcggtggtctttgacccgggctttctcccgacggtcggctactcggccgtgcgcatcatcggcggctttttcatcgcgatggcgctcggcgtcgtgctcgggtgggtatcctcccggttctgggttgtggaaacgctgctgcggccggttacggcggtcatcaaggcgacgccggtcgcgtcgtttatcatcctcgttctgctgtggttttcgagccggaacctctccgtcatcatttcggtgctgatggttttccctgtcatctacacaaacacgctcgagggcattcagagcgcagacccgaaactgctcgagatggcgaaggtgttccgcatgtccgcgccgcgccggctgctgtatatctacctgccggcggtgattccgttcttcgtctcggcgtgctcggtctcgctcgggctgtgctggaaaagcggcatcgccgcggaggtcatcggcattccggacggctcgatcggcgaactgctctacaatgcgaaaatttacctgcaaactggcgagctgctcgcgtggacggttgtgatcgtcgcggtgagcgtgctttttgaaaagctcttcatgctgcttttgcgcaccgccgtgaaaaagctcgggatgggaggcgctctgcgtggcaagggctgaaaatttgactgtaaaatacggggaaaccgccgtgctcgaccagttttcggccgatttcccagacggtgccgtgacggcggtttcgggaagatcgggctgcggaaagacgacgctgctcgcggtgctgctcggcctgctccggccggatgccggggtgttttccggcttccagaggccgagcgccgtttttcaggaggaccggctcctgccgttcctcagcgcggcggggaatatcgccgtggcggcgggctgcacggaggcggaggccgcggcggcactttgttcggtcggctttgacaatgcggacagcgaaaagcgcggcttcgagctttcgggcggcatggcgcgccgcgtggcgatcgtccgcgcgatgctggcgcagggcgacgcggtcttgctcgacgaaccgttcaaggggctcgacgagcgcacgcgggaacaggtcgtccggttcgtcaacgaacgccgccgcgggcgcacgatggtcgtcgtgacgcacgacccgcgcgacgccgaggatctgcacgccgtgcatgcggtgcaaatgggcggccccgaggatgccgcccgcagcgcgggtgaaaaagaatagaaagcggccgggcattgataagaacccaaaagtcctttcacgaataggccgaaaacaagcaaaggctgccccaaataggaaactatttttaaatgttcacaaattatttacaaatgcagtttgtacaaccagccgaaaggcgtcgaacctaacttggttcgacgcctttcgataaatggggggacaaaatagataacaactataagcgcgggcacaagaccatagaaaaaataaagccccgcacgcggactgcgtgtcgaggctctcgactgggtttacacgacaaaaaagatgcccgttgaaatgaaaaattccggggtcgttttcgcgttataatttattcatttttattttttggggtcccctttttgtaaaagaggacgatcctgaaaaaacagtttgaatgctggaatttatgacatgaaaacagccgacgatctcaccatgcaacagagctgtcgcggcagatccgtgcttaaaccagattaggagaatcaattctcaaattgcgctttaatccgctcattcacccgagcatccattccatccggcagcagcactagatcttcttccaaaatggaaatctctgcgatgtcatctttttcaccgtattgcggaaagtttactaaccagtatccctccatgcgttgttccagacaaatccaaccctgcatccctttgtgcacaccatcttgtgcgtacttctctttttccaccatcacttcaacacaatccatctctttcatactacttacctccatatggcgcatttaatttcaacttataggagctcaatcctcatattgcgctttgattcgctcatttactcgagcatccatcccgtttggcagcagcactaaatcttcttccaaaactgaaatttctgcaatatcatctttttcaccgtattgcggaaagttaaccaaccaagtcccattaataaagtccggatcacagatccatccctgcatccctttgtgtacaccatccttcacatatctgtctttttcgttaattacttcgacacaatccatttctttcatgctatttacctccatatggcgtgtttaatttcaacttaccgtttgactttaccatccatcccgttataaacgatacttcgcacgttccatcttttcttggaatggtaactctaatgttaattctttacccgtgctcatttaattttcctaaagtataatctcctgcaagatacttttcaagagcctgcttttctatttctgcttgcagccaccgcgcgtcggcgactgtatagccccagctttcaaaggccctgttctttccatgctgataaacattgtcagtgtcaaataagtagggatcaaatttactgtaatcgctgtatgtcgttgcatccattaaaaccaccgtgtaatcaattgggtctaaagtacagtgacagaaaggatgatgcggccacgtgggcgacttgcttttcagaaaccagcagccgtccagctttaagcacacatcacaatgggttttcccttctggatggtgtgtccactgaatccagtctggcgcggcagatttctgaacaaagaggaaagcgggccatcgtttgtgataactgccgttcacttctggaagagctggcaaagatttcgatacggatgataacttgtcatatggcaaaacgtaaccacatgctttctggatatacatttaaaccatctcctattgaatgataagaacaaaaaagtcctttcacgaataggctgaaaacaagcgaaggttgccccaaaataggaaactatttttaaatattcacaaattgtttacaaatgcagtttgtacaaccagccgaaaggtgtcgagcctaacttggttcgatgcctttcgataaatggggggtgacaaaatagataccaactataagcgcaggcacaagaccatagaaaaaataaagccccgcacgcgggttgcgtgtcgaggctctcggctggctgggctggcgggattcgaacccacgggtgacggagtcaaagtccgttgccttaccgcttggcgacagcccaatatgcagttttctctagcaggagactgcaaaagtatagcacatttttgcccgatagtcaaacactttccataaaacaacggccccgccgcggtgttttccgcggcggggctgctttgcgtgtgccggtcagtcctcgatgggcgcctcgagactgttcatcacaagtccggtgatgagcttcgggtaaaaatatgtcgatttctgcggcatcttttcgcctgcggcggcgacggcgccgatttcctcgacgcgtgtcgggttcagcagaaacgcacactggctttcgccggcctgcacgctctcgagcgcttcatccgcggagcgggtgtaggtcaggtttttctggttcgccatgttttccttgtcgatgccgagcacgcgctccagaacgagcgtgtgcagcacgctgacatccagcccgcgggaggcatcgctcttttccggcaggaaatccgccatgacggctggatcccggagtgtgagcagcgtgtaggcgagtgcgccgtcccgctttgcggcgaatacaaacgactttttgcccgcgtcgtagtcggccttgaggcgcggctcaaccgcgtcccggccgggaagcggctcaatgtcgaagtattccgcgctgccggaaagcacctgctctgccgaaaaatccggcaggccgcgcacgaggcggtgcgtggggaacacaaggaggccggggtgcgccatatcgacgagcatcatcataacaaattcactgcccggcgcccaaacggcgttttcgcggcagtagttccggtagttgatcgctgtctcatagcggtggtggccgtccgcgatatacagcttgcgcgcggcaaaatcgctgcggaatgcctcgatggcaagcgcgtcgttgacaatccacaggcggtgcgtcacgaggccgtcggaaaattcacaccgaggtgtgccgctcgaaaggcggtcgatacggcgctgggtctcgccggtgtcgtccatataaagggaataaatctggctgaaattgcagttggtcgcctgcatcaggttgaagcggtcctgcttggctttggagagcgtctcctcatgcggcagcacgacgcccgcgctgaaatcctccacgcggacaagactgatgatgcccttgagcgagcgtttctcgccgtggtcgacgccggtgagaaattcttcctcgtagatgtagatgcccgcgtcgtcgtcgcagtgcagcgtgccgttcgaaagccagccgcgcagcgttttcccggcgtcgccgtagggatcctcgcccttcggcagctcgagccggatgacgttgtgcgggttgcgcgcgaggtattcggcgcgctccgcgtcgctgatgatgtcgtagggcgggcaggtcagctctgcgggagagccggccgcggcagtatagcgcatggcgtgaaaagccttgatgtcggccatagtggtttcatcccttcaatctttttctaaattgtagcgcagggcgcggcggtgtgtcaagcgcaaatgtgaaagcaatgtgttaaagggcggtaaaaaacaggcggcgcgcaaggaaggccgtgcctgtgcgaaagtttcgtaaatttgaggagaattttacgcgatgcgggcgaagcgtaacgaaaaatagagaaacataaagggtgcgaaatacgcacagaacttcgaagaaaaaaccaaagacaaatggatgaaatatcaataaaaataaagggataggggaaaataccacgataattctgaatcgaaaataaaaaaacagtgctttttgatattttgctcttgacaagcgcggagaaacatgcgtataattatagcgtaataaatgagtaacaaaagtaaacaaatagagaggttgagaaaatgcggcaaatggctctgcggagcttgcatattacattcaaagggaagaaagtaagaaaatgaagcgaagaatcatggcggccctgctggctgcggcgatgctgctttctgtggccgcgtgcagcagcggcggcgaaaacagcgcgggcggagaggcgcaggaaagcaccggcggcgcggcgggaacaacggagagcacggccggcgagggtgcggcggacggcgacacgggcctcacgtacgacggcgaggaggtgacgatcacctactggcatacgcacggcgacgccgaggaggtcgtgctcaaggagcagatcgtccccgagttcgaaaagcagttcccgaacatccacgtcaagctggtccgaatgccgtatgacggcctgaagcagcaggtgattcagggcgtttccagcggaacagcaccggatttgatgcgcatggacatcatctgggtcacagagttcgcgaagctcggcgcgctggtgcctgtggacgacctgcccggttttgccgaaatgaaggaaacgctgtttgaggggccgttgagcaccaattactacgagggcaagtattacggcctgccgctgaacacgaactgcctcagcggcgcgtggagcaagacgatgctcgatcagctcggcctgacggaggtccccaaaacgtacgacgacatgctcgcgctcaaggatcagctaaaggagggccagtacctctttgcgacggaggacacgaacacgtgggcgaccgcgccgctgttctattcgctgggcggcacgtacacgaacgaggactacacgaaggcgagcggctacctgaacggcgaggcgagcgtcaaggcgctggaaacgatcgtacagtggtatgacgagggcatcctcgggccggcgacgatggccggtaagccggacgtttcgaacggtgttttccgcggcgaatatctcctgacgtatcagggcccgtggttctacacgaacaacaaggaggaggacatcgccaaggtgcaggccggcctgcttccggcgggcgacgccggttcgatgacggttgtcggcggcgaggacctctgcatgttcacgagcggcaagaatcaggaggccgcgtgggtattcgcgcgcttcctgatgggcgagtttgcccaaaaggcacaggcgctgggcggcggccgcctgatcccgaccgtgaaggagtttgcgaattctgaggaggtcatggccgtcgagaacatggacgtctacgtcgagcagctcgaaaatgcagtttcgagaacaccgcacccggcttgggaaaagatgtccgataagatcatgaagcttttccagagctgcctgcgccacgaggtggagccgagagctgcgctcgataagctcgcgccggaaatcgacgcgctgctggcggagaaataatgcggaaataaaggcgtggccggcgctttccggacacgcctttatttttcaagcgggataataaggaggaatgtcacgtgaaaaaggacgcgctttcggtgcggttccgaagagggctgcgtcagtgggcggcggtgctgccgtttatctcggtggggctgatgctgtttgtggtctttgtgctgtacccgcagatcaagaatatctacatcgcctttacggattacagcatcatgcccggcgcagagacgccctttgtgtttttcgataatttcaagcgggcctttgagggcatgttcgagcagggaacggacgcctattatttctggatctcgtttcggaacaacctgctcgccgttctggtcaccgtgccggggcagctcatcctcggcctgctggtcgcggtgatgatccacaacatccggtttggaaaaaacgcatataagatcatgttctacatcgccgtgatctgcgactgggtcgtcgtggccaatattttcgattacatcttccagccggataacggcagcctcgtcaactacgtgctgcttaagctgcacatcatctccgagccgatcgcgtggcttcaggaaacgtggagcggcaatctcgtgatctgggtgttcagcatctggaagggcttcggctgggtcatgatcatctacacggcggcgctgcagggcattccgaacgacctgtacgaggccgcgacgatcgacggcgcttccacgatcgataaattcttccacatcacgctgccgagcatccgtggcacgaccttctatcttctgatcaatctgatcaacggcgcgatgaacatcttcattcaggtgtttctgctcaccaaaggcaacccggtcggcacgaccgacgtcatgatgaactacatatacacgcgggccttcaattactttgaattcggctatgcggcggcctgcggcctgatgatgggcgtctttgtgttcacaacgtcgatgttcctcaagcgctacctgcgctacgggcaggatcaatgagagggggagaaacatgaaaaaaggaaaaattatttcgcaggccgtgctgcatgcggttctgatcgtcctcgcggtcatctgcctcacgccgtttctctccatggtttcctcatccttcatggacatccgcggcgttctgccggatgtgccggtcattttcccagaaacgccgctctacacggaaaattatgtcaaggtatggacggccaacaacttttcgcggtattttgtgaataccctgctgctttccgcaggcggcctcgtcgtcaacgtggcgatctccatctcgatggcgtacagcttctcgcggtttaagtttccgggaagggagcttctcttcaacgtctttctgctcacgatgatggtgccggcgcagctcgccctgatctcgcagtacaccgtgcttaacggcctgcatttgatcgacaattacgcgggcatcctgctgctgtggggcggcacctgcgtggccggcaacacgtttttctaccgcggcttctttgaaagcgtgccgcgtgagctggaggagtcgatgttcctcgacggcgcctcgcgcttcggcgtcttgatccactgcatcatcccgctcagcaagccggcgatcgcaacctctgcgatcttcgcgttcaacggctactggggcgacctgttcaacatcctgacttttgtaaagaccgaggaaaagcggacgctttccgtcgcgctgcagctcttccgcggccagcacacgaccgaatacggcctgatgttcgcggcctccgtgatcgtcgtcatcccggtcatcgtgatctttatcatcttccaaaagcagttcatgaaacaggggctgatggagggcgccgtcaagggctgaccggcacgccccgcacaaaacagaaaaacacgcggcggcgccgcgtgaaaatcaaagcatattttcaaaatagggaggaaagaaaatggcaatcaaggtaacggtatggaacgaatacctgcacgagaagcagtttgaggaggtggcggcgatctacccgaaggggattcacggctgcatcgcggagtttctcgaaaaggcggggatggaaacaaaagcggcaacgctcgaggagccggagcacggcctgacgcaggaagtgctggaggacaccgacgtgctgatctggtggggacacatggcgcacgagcgcgtggcggacgagatcgtggagcgcgtgcacaagcgcgttttggacggcatgggtctgatcgtgctgcactcgggccacgcgtcgaagatttttcagaaagtctgcgggacgaactcgggcatgctcaagtggcgcgaggacggcgagaaggagatcctgtgggtggtggacccgagccatccgatcgcggcgggactggatgaaaagatcataatcccgcacgaggagatgtacggcgagcacttcaacatcccgcagccggacgagcaggtgtttatcagctggttcgagggcggcgaggtgttccggagcggctgctgctggcaccgcggcaaggggaaggtgttctacttccgcccgggtcacgaggtgttcccgatctaccatcaggcggagattcagcaggtgatcacgaacgcggtgaagtgggccgcgccgatcgagttcgcaaaggtttcctacggcaatcccccgccggtcgtcgagatcgcggcgcaggcggcgggcatcacgggcaatcccggcctgcacgagccgaagtaaagggcgaaacgtgtttattgcagagcggtaagcgggcccgcggggcccagcggttgtattgaaagaacgctttcagcgtacagaaaggaaagacagtatggaaaagaaggttatccgcatcggctcggtcggtgtgggcgcaatctggacgggcgtgcacgagccgggtatccggcgcagccccgatctcgagcttgtggcaatctgcgacatcgacgcggaaaagctgcgcgccgtgggcgaaaagtacggcatcgacgaggcgcaccggtttacggactaccgcgacctgattcgctgcccggacgtggacgctgtggacatctgcacgtcgaatgacgcgcattttgagatcgcgatggcggcggtcgaggccggcaagccgtatgacgtggaaaagccggtcaccatgacggccgcagaagccgatatactcgcgaaggccacggccgaaaaggggctgccaaacatggtgtgcttctcctaccgcttcaaggccgcggcgcgctgtgcccgcgagctgatcgagcaggggaaaatcggccgggtataccacgtcgatatgcagtattttcaggcttggggcctgccgcgctgcaatacgccgcgcgtgtggcgcttcgtaaagtcgcgcaccggctcgggcgccatgggcgatctgggctgccacgcgctcgatctcgtccgtttcgtcgtgggcggggattacacgcgcgtggtcgggcatacgggcacgtatgtcacggagcgcaagcggctggacggtacgggcatgggccccgtggacgtcgacgacttctgcaactacatggcggacatggagggcggcgtttccgcgagcttccagatcacgcgcttcggctacggccgcggcaactaccagcgcatggagatctacggcagcgagggcgcaattgtctatacgctggatgcggagccgggccgcgaggacgagctcgaggtctgcgccggcgacgtgtacgccgacgcgcacaccttcgtgaagctgccgattcccgagcactgccgcagcgatcagatgcagtcgtttgccgatatcatcaacggcagcgcggacggcaaggccgcgacgatcgccgacggccgctcgaaccagcgcgtgctggatgcgatcctgcgctccgcacaggaggggcgctggctggcggttccaaaaggcgagtaaagcgcccggcgctcaaaacggcccccgcgcggcgcgcggaaactgaataaaccgcgggatgcttctgcaagcgctttcaccgtatcggattcggcctgtaaagcgcggcgggagcattctttttgcctgtgcgccccggttgcatttgacaagggaaagcagtgcgggtataataaattcagatttatgttgtcgatcggaaggaggtgctgtatggcgaaaaaagtgacggtccgcgatattgccaaagcggcgggcgtatcggtcgccacggtgtcgcgtgttttgaacagccagtcgggcttttcacccgaaacggagcgcctcgtgcaggaaacggccgggcggatgggctaccgtattccggagcgcaaggcgcagagccgcgagaccgaggcgatcgcgcttgtcatcccggccgtaaacgagtatttcagcggctccctgacgcgcagcgtcgagaatgcggccagaaagcgcggctacgtcgtgatcctctgcaatgccgggtgcgacgcgatgtacggcgaggaattcgtcgggcttttgaagaaaaagctcgtcaagggcatcgtcgcgtgcagcatcccgccggattcggcgctgctccgtgtgatctgggaggcgaagctgccctgtgtcctgatcgacagcgtaccctacgaatacacttttccctatgtgaagatcgacgattttcaggggatgtacgcggcgacgaagtttcttctggaccgcggccaccggcgcatcgcgattctttccggcgcgatggaggatcaggtggcgggcggcccgcgcatggaggggtaccggcaggctctgcgagacgccggcatcgcgccgagcgctcagctcgaggcgttcgcgggcgatttcagctatgagagcggccggaaggcgtttatggagctgctttcgcgcgaagccgatttcaccggcctcgtgacgtgcagcgacgtggtcgcggctgccgccatcacggcggcagcgaagcgcggcatccgcgtgccgcaggagctttcggtgatcgggtttgacaattcacagatcgccgcgctgctgaacccgccgctgacctctgcggcgcagccgtatcaggagatgggcgagatggcggtgcaccttctgaagaaggtcatcgaatacgagggcctcgtggaaagccgcgttttccccgtgcacattgtggagcgggaaacgaccgcgcccccgcccgaaaaatagaaaataggcgcaaaaaaagcaagaggagaaaaactccccttgcttttttgtttagagcaggttcatccgcacggcgatcgagaacaggaagatgccgagcatgaccgcgccgagcacgacgagaccgatccaccagccgggggtgcggcgcaccgtgccggccgggacgcttttcgggatgacggccggctgcgtctgctgcagctttgtgggaccgggctccacgcgcggcgccgcgtattgcaggtcaaactccgcgccgcagtccgggcagcgcacaacggcatcgtcgatcagctttccgcattttgggcacatcataagagctcacccctttcgggaacagacgagcgcgcaggatcgcgttttaaccggcgaacaggccggactgtgcgagcacggcaaacacgatggcgccgagcataatggcgccgagcgcaatggcggcaatccaccaaattgcggtgcgcctgccgccccgtccgaccgggactgttttcaggatgacgtttgtcggcgtaaaggaggacttcgttctgccgccggtcatcatgacgggcgaatactgcacgtccagctccacgccgcagtccgggcaccggacaacgcccttttcgaggttctttccgcatttcggacacatcatagaaatccctttcctttctgctgaacagggggtacggtgtgaaaaccctttccacacaaatctccaccttcagtatagcagagtgcctagaaaatataattctttatcggaataactggaaaaatattttaaatgcggttacggctttgccgaaacggcaagcagatgggtggaaagtcccgtaatatccgcacggcggtctgtcaggcggacggtgcgcatcagcgcctcgcgcgacgcggaatcggcccagagcgcgtcgagttccggcgcaagccacgccgcgcccacaacgccgtgtacggcgctttcggggaagccgccgtccgcaagctccgcgcagagttcggcggcgctgtgaaagtgcgagcggcctatgccgcggtacgcggtattttccgtcgggcggatatgctcgccgtccgtcagctcgcgctcgaccatgcgcataaaggcgtcctccgcgatcagccggttgtcccggccgaaaaccgtcgtggcccacagcagcgtggcgtacggcgtgatggcggcggtgaacagcaggccgccgggcttcagcagccgcaggctttcccgaacggcggcgatgcgctcggccttttccgtgatgtggtacagcggccccatcaaaagcaccgcgtcggcgctttcggacgggcggccgaccgaccgcgcgtcgcagacctccgcggcgcacagcgctgcgccggggtattcggcggcgagctccgcggaaaggcggatgttcgtttccgcaaggtcgaacaggtggacttcatagccgagcgacgcgagccaccaagcgtattcgccgtacccgccgccgatgtcgtagaccacggcgggcggcttcggcaggtactcgagcagcagctcctttgtgcgcgcgagctcgattaggccaatgccggtgtgcaggcggccgcgctcgatgccggcgttgtagccggccagaacatcccggtcgatagatttttcattgttatacatgtgtttttgtctcctttcccaaattgctgcggtttggattcagcttgttgggggagatcgttctgttccggcatttccgccgcctgcctttcagaccggcgcctgtgcgtcgggtaaattatctgctggcattaccatcgccggcggctcttttaattcggtgcaggaaaataaaggccgcagatgaaaattattccgttctttaccggagggcgcggatgtacagccggtccggaattcccggcgcgtatcggacaagggcaaaagcgcgaacggggaaaccgctcgcgctgatttgtctgtatgcaggccggggccaatccggctgttagtcgacctcgcccgcggcctttgcggcctcgatgaccttctgcgccacgttggcgggcgcctcctcgtagcggatgaattcaaacgtgaatttgcctctgccctgcgtgacctgacgcacataggtgctgaaatcgtgcatttcggccatcggcgcttcggcctcgacggtctggtagcccgcgtctgccggagacatgccgagcacgcggccgcggcgcttgttcacctcgcccatgatgtcgcccatgtttgcatccggtacggtcactttaagtgcgccgatgggctcgagcagaaccgggttcgcctgcggcatgccggccttgtaggcgagcgtcgccgccatcttgaacgacatttcgctcgaatcaaccgggtggtaggagccgtcgtacagcgtggccttgaggccaacgaccgggtagcccgcgagcggccccttcgcgatacagtcgcgcaggcccttttccacggcggggaagaagcccttcggcaccgcgccgcccacgacgcgctcggcaaactcgaggccgtccgcatcgcacggggcgaactcgatccaaacgtcgccgaactggccgtggccgccggtctgtttcttgtggcggccctgcacggagaccgtcttgcggattgtctcgcggtacggcacgcgcgggctacgcagcgtgacgtccacgccgaatttcgatttgagcttcgagacgatcatgtcgaggtgctgctcgcccatgccactgatgaccatttccttcgtctccacgttgttgacgaagcggatcgtcggatcctcctccgcaaggcgcatgatgccctgcgcgattttatcctcgtcgcccttgtttttcgggacgacggccatgctcatctcgggcgtcgggtactcgatggggtcgagcgtgatcttgcgcgccggcgcgcagagcgtgtcgcccgtatttacggcggagagcttcgggatcgcgccgatgtcgccggccgcgatcgccttgacgtcctcctgctttttgccgcacatcatcacggttttgccgatgcgctcgacgttgccggtgcgcatgttgacgagctgcgtctccgtcgtgattttgccggaaagcactttcacgtaggagagcttgccgatgaacgggtccgcgaccgtcttaaagacgatggccgccggcgccgcatcctcgttgaccgcgatctcgaccgggttgccgtccacatcgacggcgagctcgccgcccttttcggcggcgctcggcgcgagccagcacaggccgtccataaactgctccatgccgcgcatcagcatcgcgtcgccgcagaataccggcgagatcgtgccgcgcttgacgccctgagaaacgccgatgatgacctcctccggcgtgaattcctcgccggagaaatatttttcgaaaagctcgtcgctcgtttcggcgacggcctcgtaaatggctgtgcgcaggccctcgaggcgcgcgcccatgtcgggcatcggcacctgaaccggcttgccgcccgaatagtcgtacgccttgtattcgagcatgttgatgtatttatcggccttgccgtcctcaaaataagggacgacgatcgggcacacggaggggccgaagctggccttcaggtcctcgaaaacgccgtagaaatcggagccctcgtcgcacaggccgttgacgaagaagatcttcgcgagcccgcgctgctccgcggcggcaaaggccttttccgtgccgacggaaacgccgctcttgcccgcgagcacaatgacgacggattccgccgcgcgcgccgcctcatacaggccgccctcaaaatcaaagaggccgggggtgtccagcaggttgatttttttgtttttccactcaaacggtgcgacggccgtggaaaccgacgttctgcggcggatctcctcggggtcgtaatcacagacggtgttgccctcgcccaccttaccgcggcggtccgatgcgcctgcaagatagagcattgcctctgcgagggaggtcttgccggcgccggaatggcccgccattgctacgttgatgatgttctttgcctgatacgtgttcatggaaacaccccttatatgtatattgcacaatttcgtatgagattgcacttttgattatatatcaaatttccggaaaatgcaatctctaatcgcaacttgtacagatattctattttaatatatgccggtatattcatgttgcacagaaaagccggccgaaaaaagaaaaaatcccgcacagcccgtaaacgggtgcgcgggatctccttcactgcaccgtttccctgccgagaaacgaggcggcgagctttgcaaggcgcaggctgtcctccggctcgccggggcggctgttttcgcccttaatcagcatgaacatgccgcagatgtcgccctgactgagaatcgggaacgcggcgtccgcggtgcggagcccgccgtccgcggcgagcacggtatcctcgccggaggagatgaacggcttttttttgcgcatcagctcctcgagctgcttggagaccggcttgtccacaagctcctttttcgggatgccggcggccgccacgatgcggtcgcggtcggaaacggcgacgccggcgccgcacatggcggagacgcactcggacatgcgctgtgcgctttcgctcatctcgccgaccggggaatacttgcggaagatgatgccgccgtccttatcgatgaagatctcgagcggcgtgccctcgccgatcttcatggtgcgccggatttccttcgggatgacgacccgcccgagatcatccatccgccgcacgatacctgttgctttcatgagttacgaacgctcctctctgctttatggaaagcaccggcaaaagccttctgggtgcgcaggtagtatttgcatcgaaaggaatgatattcgttttccggaagaattatcggcggccgcgcgcatacagggcggtatttttgcgcgcggcgttttaccaaagctggttttccccgagctccagcacgatgtctgtgttttcaaaatcggccgcatggcgcttcgccttttccgaaatcagcatcagcatggttgtcaggtgcaggctgtcgctgcggaaaggcgcccgctttgtgccgcccacaaggcgggcgcccgcgtctgcggtccagccgccccgcgtgtaaaaggagaccttctccggcgcgcaggtaaagaggctgaggtcgggctgacgggcgatgatgaagcgggcggcctcccgaataacgccggaggcgatcccgcggttttgaaagcgggggtgggtgacgacttcgctcaggccgtaggcgaggtacgtctgccccttgtgcgcgaaggcgcagcgccgaacgcccacgtggcagacggcttcgccgccctcgagcaggacaaaggaggtcgcgtgggtatcgggtgcggtgggaaacggctgctctgcgccgtctgcgggccatgcggtgctttgcagggcggcgatcagccgcgcgagcgccgcgtcggccctgtcctgcggatattgtatgagcggcatgcggccgcctcctttcacgcgtggttttctgcggtgtatctccacaattataccacgattataagtgaaacgcccggattagtcaaccgcaagccccttgccggcggcgaaaaaggcgccatccgccgcttttcttcttgcgctttcaggggatatttggtaaaatcgaaacaggggcggaaggggagcgggttgtatgaaaaattgtgtggaaaaaatattcggcgggcttcgcggcagctatttcagctatgcgctgacgtaattttcgttttatttcggcatgggcgcctttatctcggtgcagtctgtgtatctcatgggcctcgggaaatcgacgggggagatgtcctttatcgtctcggcgtcaagtctgttcggcatcgtgctgatcccggcggtcggctatctcaacgaccggctcaagaagccgcggctgatcgccggcctgctgcttgcggcggtcgcggtgctgggcgctgtgttcgccgcctcgcgcagcacatgggtgctgtacgttttgaacggcctgatcatgggcctcgtctccgcgatttcgccggtctgcgagcgcatggcgggctcgggccggttccgctacggcacggtgcgcgtttggggcacgatcggatacgccgcggcggcgcagcttgcgggcctcgtgatggaatttattgcgccccggatgattttcgtcctctttggcgcggccatcgctgtggcggcggccggttttgcgggcacggacggcattcggtttgagcaggaggcggagaaaagcacggcggcagatcagctttcgtttttgtcgaagccgatgtttctgcttttcgcggcgattgcgctggtcttttccggcatgtcgaacctcaacatcacgtacagcccgatcctgctgcaggagcttgggctttcgacgggctttgtcggtaccgcgctttcgctgagcacgctcgtcgagctgcctgtcatcttgttttccaaccggtttatggaccgtttttcgggccgtgcgctgacggccgcgggctttgcggtgatgctgctgcaatttctgctgtacggtttctcgtccagcgcatggctggcgtttttatcgatgcttctcctgaaggcggtgggctccacgctgtttatgatgatcatgctcaaggtggtgcgcggcatcgtgcgggagaactcggtctcgacggcgctcggcgtgatcaatgcggcgaatgcggtcagcacgattttgatgcagaacctcggcggcttcatcgtcggagcgcttggcatccacacgatgtatttcctgctggcagggctctcggcgctggggctgctcctcagccttttcctgcgcgtgcagaatgcaaaaaaagtgttttcctgagcgtatcgtccgcagtgtgtgcggccgaaatagaaaaacagcataaaaaggaagaaaattaagagaaaaaagcggatgcaccgtatttgcgtgtgcatccgctttttggttttgcaccgtgcgccggccgcccggaggcggcaagggggcgcgtgcggcttatggggctggtcagcccccggtgctccagtctgcaaggccaaattcgtcgtagctcgtcttgtattcgaccgttgcggcggcgacctcgggcgattccagcaggttctgctggtaggctctgaatgcgtcgatcgtcttgttcccggtgacgacgtccgcgcggaacgcgttgaactcatcctgcgtcagcgcccagtagtccgaccatgtcggggaggaaatgatgttgaagatcaaaaagggcgcgccgtcgattttggcggcaagcgtatcgacctcctgcacggtgtcctgcatggcgaggttgtaggcggcgggcgcgagcgggctgttgaccttggtgtaggtcgcggtggcgagcgtaaaggggatgtagaaggaattgttgacgaccttcttgccctcctccgtcagcgcggggaattcgtccacgatgttgtagtgcacgccctcgatgccgtagtagaagtagttgtaattctccgggtcgcacgtctgctccatgaaatccatccagcgcaggaacttttcctcgtccagaccgctgttgacggaaaggccgcccgagtagcccatgtcgtagaaaacgctggtgccgccggggccctcgaggccgaagatcggcacgaagctgccgtttgaatcaacctttttgatctcctcgttgatgcggtagctgtgccacgcgtttttggagtaaatgccgcccttgccggagagcatcaggtcctcggtctggtcgccgttgagcagcgcgaattcctgcgagacgagccccttgctgtaaagctgcgccatgtattccacggcctgcgcgtagctttccgtgagctggaacggcacgatgcccgtaccgtcgtccgtgtagacgggcaggatattgcccgggccgaacgcggcctgcacgagctcgatcggggaatcgagattcgaggggaccggcaccatgccgggctcctgcgcaatggcttcaaaatatgcggtgagctcgtccactgtctccggccgggaaaggccgtatttttcgagaagatccccgcgcaggaagtagcagttgttgtactgcccgcgggagttcgggaacaggtagttgcggcccttgtactttgagtttgtccacgctgcggggttcagggcgcagaggttcgggtagtcctccggcttcaaatagtcggtgagatccttgaacatgcccgcctcggccgccttgacggtccacggcgcggtgacctgctccacgcggatgacgtccggcagatcgttcgtggagacgagaaggctgaggcggtccacatacgaggtgacgggcacccattcgggctggtaatcgatgttgtacctttcctccatgtcccgccagtattcgccctccgtgtcgggcggcgtctcgtacatggtgagcacggcggtgatctccagcggggggagcttttccccgtccgaggcttccgtttttacgctttcgggcgcgctgctttcttcgccgtttcccggggtgcaggcggccgcgcccagcgcgagcagcatggccagcgccagagcggcgccgcgtcgtttcttgtcttgcatgatttttacctccttaacagatgcgtgtgttttaggatgaaggcgggatcagcccttgaccgatcccaccatgacgcccttgacaaagtagcgctgcacgaacgggtagacgcacatgatcggcagcatggccagaatgaccgtggccatgcggatggtttcggaggggagaacgcggtcgctttccatcgcattcatgcccatcgtgtccgaatccaccagaagggatttcaggtagacctgcagggtgtgcatcttgtagtcgttcaggtagagcagcggctttgtgtactggttccagttgctcacggcgataaagagcgtgagcgtagcgatggatgccgtggagagcggcaggatgatgcggaaaaagatgccgaagtacgagcagccgtcgatcttggcggcctcctccagctcgccggggatgccctgaatgaagttgcgggcgatgatgacgttccacgaggagatcaggccggaaaagatcagggaccaaaagctgttgagcaggccgagcgtgcggatattcatgtattccggaatcatgccgggattgaagagaagcccgaaaagcaccacagtgataaacagcctgtgcaggggaatgtcctttttggaaaggccgtaggcgaaggtaaaggtggtgaagatgctcagcaccgtgcccacaagggtgatgtataccgtgttgccgaggctgcgcgtgaaggtgtccgtgttcaagatggagcggtacacctcgagcgagaattttttcggaaaaagctggaattccagcgggatatagacggacgggtccgtgaacgacacgatcagcacgtatacgaacggcaggaaacagaccagcacgatgatcccgagaatgaggtgcacggcggcgtcgaagagcgtgagctttttcggaaagcggcgctttcgccgggcgggcgtcagggcgctttgggttacagcggcggattcaagcgtgttttgcatgggagagccctccttttactcagtagattccgtccccgtcggcttttttgacgagccagttgctggcgagcacgaggcacagcccgacgacgctcttgcacaagccgacggcggtgccgatgctgtagttgccgcgctggatgccgatgcggaaggtgtaggtatcgaacacctccgacacgctcgtgacaaagtcgttcgtcatcatcagaacctgctcaaaggagacgtccagcagcgtgccgagccgcatgatgaacatgacgacgatggtgggcatcaggcacggcagcgtgatccgcagcactttctgcatgcgcgtggcgccgtctaccgtcgcggcctcgtaaaagctggtgtcgatctgcgaaatggcggcaagatagatgatggagccccagccgcattcgcgccacacgttttgcagcagcaggacgatccaaaaggtgcccggcgtggagagaaagctctgcgcctgcccgccgtttgcggtgatgaatttattgacgacgccgatgtctacgctgaaaaggaaaaaggtgatgcccgtgatgaccggccaggagagaaagtgcggcatgtagacgatcgactgcgagagccgcttgaagcgctcgcttttcacctcgttgagcagcagggccagcaggatcggcgcaggaaaggccacaaacaggttgagcaggctgatgccgagcgtgttgcgcagcatcacgaaaaactgctcgctggtgaacaggtcggtaaagtggcggagcccggcgaaggggctgttcaggatgccgccgacgatattgtagtccacaaacgcgagcgataatccccagagcggcaggatgcggaagatcagataggccagcagcccgccggccatcagcacgtagatctgccagtatagcttcattttgccgagccttgaccggcgcggaacagcggcgcctccggcttttgttttcacagcggtgtcctcctttgtgtttcgtctgtattttgtgcccaaagtataagcgcccgaaaagcgagttgtcaatgtacaatagtttagacgatgcgcacgacgaattttgtgtgctttttgctgccagaatcaggtgtgcattttttgggatttgtgggcgatacttgcgaatatacatgaaatttgaaagatagatgtagattttttgacgatcctgctgtatcattggggtaaagaaaatgcggttttcgcccggcagagggccgcggcggaggcggtggtgcagagggaggcgcggtgcagtatgaaattaaaacgcttgcgggggctgacacagaggtacagcttctttttcttcatcttcctgtcgtatctttcggtgctgctcttttccgttttgttcagcgcctacaactacggcgcttatctcggcgaccttcgggagcagaaggcgatgtacgacgaggtcatgctgcagcagctggacgagatgatcggcgcggagctcgacaaagcgaacgcgcagctcgtcaatgttttgatggatacggacattatgaaggcggtggccgcggaggacctcgtctccggcagcaggctttcgcagacgctccgcgcggcaaaccagatgcgcagctacagcaaggcggtctccggcatgtacatctattttgaaaacggcgacgcgatcatcatggacggcgcgtattaccgccccgaggatttctacgcccggttcatcgacggagaggcgatcggctttgaggcttggtatgcgcagcagacggcgcagcacgaccgcgcctgccggcaggcattcacgtccaccccaaacgagctcgttttgtatcacaccgtcatgagcgccggggcggggcggcgggcgctggttgcgattcggattgatctggaaaatatcctgcgcattttcaaggactcctttttctccgggcagatggcgtttcagatcacagacggcagcggggcggtgctggcggattacggctggcaggccctgcccgacggcgaaagcgagcgcaccgcgccgtttgtctcgaggcgcacgggctggacatatgcctccgcgataccgtccgcggtgtacaaccgcgcggcaaacgagctgctgctccgctctgcggccgtcctgctggtcgagctggcggccggcgttctgctctcgtttttcttcgcgcgcaccaacatcgcgccgatccgccgcatttataagcgcctgagcggcgggggtacccggccgggggcggtgaaaaacgagtacgagctggtagattcctgcatgaaaacgctgctcgaggagaaggagcagcttctcaggcagcacgaccgcgcggtcaaaaacaacctgctcttggagcttctcaacggcggcgccggccgggcaggggcttccgccgactatgcggaggtgctcggcgccgaccccgaggcggcgcgctttcgggttgccagcatcgccttttcgcacggggatgcggcacgggccggcagcctcgagagccgctcgctgatgaaatactgcctgactgagctgctcggcaaggcgtttcagacgtatcgcctgcatattgcggatgtaaactggaaccaaacggcggtgatcctgcacggcggcctcgaggacggcgcggagctgatctgccggcgtatggagcaggttcggcaggcggcggaggcggaatttcatgtttcgcttagcatcggcgtcggcggcgttcaccgcgcggcggcgggcgcgggcctctcctaccgcgagagcctcatggcgcaggagtacaggctgcttgagggtcccggcgcggtgtgcctgtaccgggatattccggacggcgcgtttccgaaatctttctatcccgcgctcgacagggcgaagatcaaggccagaatccgcgcgggggacggcccgggcacggcggagctgctggacaaggtgtttgccggcatcgccgccaaccggcagcacatgccgctcggcgcggcgaagtgcctgtttttcgagatcatgggcgtggggctcgaggtgctggcggagatccggttcgagcatgaaaccgcaccgggcgagtacatgcggcagttgttcgactgccagacgatcggccagctgcagtgcgcgctgaaccgcatcctgcttgagatctgcggcgccatcaaaaaggggcagagcagccgcaaccagcagattttagaccgcatccacgcgtatatcggcagaaactgctacgacaacagcttcagcctcgtcggcctcgcggattatatggggctgacgcccacctatctctccagcttctttaaggagaaaaccggcgtgaatctggtagaccgcatcacggagctgcgcatggcgcgggcaaaggcgatgctgctcgagacgaaccggaacgtggcggaaatcgcggttcaggttgggtacgggagcagcgggacgttcatccgcaagttcaagcagctcgagggcatcacgccggtgcagtatcggcaggagcatgcgggggagcccgggagcgcgggcctgctcgaaggccgcaacgcctaaaaaagtacggcccgctgtggtgcagcacagcgggccgttttgcgggatcagccgatggcgccgtcccaagtattcactttttcgtggtttgaggcctcgtcgaaccacgtggaagtgacgaccttggtctccgtgaagaagcgcagtccatccttgccgagcgtgtgcagatccccgaagaaggactgcttgtgcccggagaaggggaacagcccgacagggacggggatgccgacattgacgcccaccatgccgccgtcgatctgccgggcaaagtgccgggcataatagccgctctgcgtgtagatgacggcgccgttggcgtatgggttccggttgatgagcgccacgccctcctcaaaggttttcacccgcttgatgcagagcaccgggccgaagatctcccgttgcccgacggtcatttcctcggtcacgcggtcgaaaatggtggggccgatgtaaaagccgttctcaaagcccggcacccggatatcgcggccgtccagaacgagctttgcgccctcctgcacgccggtttcgatccagcgcaggacggattccatgtgctttttcgtcacaaccggacccatctgcgcgctttcgtcgtaggcgcagccgaccttgagccgcccggcaagcacccggagccgttcgacgagccggtcggcaatgtcctcctgcgcgaccacgacgggcagcgccatgcagcgctcgccggcgcacccgaaggccgaattgatgatgccctttgcggttcgctccagcaccgcgtcgtccatgacaagcgcgtggtttttggcctcgcacagggcctgcacgcgctttccgtttgccgccgcagcagcgtagatcttcagcccggcgcccgtggttccgacgaagcagacgcccttgatgcggctgtcggtcagaagcagctgcgcggtgccgcggtctgcggtaatcacgctcacaacgccctgcggcagcccggcttcctccaaaagctcgagcaggcgcatggcggtcatgggcgttgtgctcgaggccttgaccacgatggtgttgcccgccgcgatgcagagcggcaccatccagcccatggggatcatcgcgggaaaattgaagggggcgattccggcgaatacgccgaccggctcgcggtaaagcacggtatcgtagccgcggctcgcatccatcaggctttcgcccatcaggagagacggcgcgccgcaggcaagctccagcggttccttcaccttgagcaggtcgccgcgggcctcctccagcgtctttccgttttcccgggcgagaaggcgggccagctcgtccatgtgctcgagaatcagcgtgcggaagcggtacagcacctgcgtccgcttgagcgccggcgtgcgtgaccacgggccgaacgcctcggcggcctgcgcgatcacgtcctcgagctccgcggcgcagatggcgggcgcctgcgcgatgcacgcgccggtgctcgggtccacgacctccatccagcggtctgtggcggactgccgccagccgccacgcccgtaatagggcagctttctgatttcctgcattttaaattcctccctcactgtgttaggcgaagccgtgctccacgcgctttagatggatttcctgagacgccctgctgagcaggacatagtaggcggaccagccgcccatgcgcacccgcaggccgcggtactgctccgggtcggccatggcccggcgcagctcctcggcgctcgtgacggtcagcgtcatcatattgccgccctctcggagaaacgcgcggatcagccctgcgatgcgctgcgtgccggcttctccctcgagcccgctccggctgacgcgcaggtcgatcggcgcgccggccgccatcggggcggtgttcagctttaaatacgagcggatggcggctgttggcccggaaatatcgcggccgggcacgggggagaggtttgcggcgatcggctcccgcgcgcgccgcccgtcggccgaggcgccgagctttttgccgatggagatgatccaagaataggtgccgatgcagggcgagaaaaggatctccgggtatttctgcgcgtgaaagtgcgcgcgctcgagaaagtaatcgatcatctccgcggcaatgccgtccacggcatcgtcgtcgtttccgaatttcggcgcgccgccgatgcactgcaggcgcaggctttcgccctcctcgccggcccagtcgctctttaggatttcgacgaagcgcggcagggtcagccgcttttccgtgtagacgaatttccgtatcgcggccatggcgtccgccgcgttggccacggcctcgcccatcaggtgccaaagggtgtattttgcgccgccgtgcgtaaggtcggtcaggttcttcacgcagtcctgcgtcagggccgaaagcagcggctttgcgtcgagcggcccgtgcgagccgtttttcaggatttcccggtacacgtgctccatcgccttgctcaaaataccgtcgagctgtattttccacgcgcgcatcaggctttcaaaggtggaaaattcagagacgcagccggtgtccacaccctctgcgatgtcgtaggagacgcagcagctcgcgccgaaggtcatggggtcgtcccggttcggcttctgctgctttttcagatcctctccgtacaggaagggctggccgcggttgagcgcaagctccagaaaatagaggaagttcagcccgcggatcatctcttggttggacatcccctgcagcagcgtttcccagcagttggagttcgcgtaccggcagccgtccgcccgcggcacgccgagccgctcgtagccgccgatgatgacgtcgtcgttgttgatgtacggcatgccgccgcccgtcttgagcacctcggcggcgcggtgcagaagcgtgtccggcgtgtttttgtgcatgcgcacggtcagcacggggcttgtcatcgaaaatttttcgtgcgcgttcaggaaaagataggtcagcgcattggtcgcgtccgagccgtccgggttcaggccgctgagcaggatgttctgcccccagtggttgatggcgtccgcgtggtcggtctccagcgcggtcacgaagccatagccgtacccgatgcggcactgctgcggcgcgcccggcagcgcccgctggtcctcaaggtaatactgcttcgggtcgatctgtgcccggtcgttgacgtgcagcacgaagctgtctacgagcgcctgcgccgcctcgagcgtgatccgccccgccttccagtcggcctcaaagtaggggttcaaaacctgatcgatccgcccgatggaaacattggagtagaccttgatcatggcgtagttgaagagccacacggactggacggcctcgtgcaggctgccggccggatattccggcacgcggcggcagacgcgtgcgatcgcgagcagttccgcccggcgcgcagcgtctgtctccgccgccgcgcgcgtttctgcaagctgtgcataccggttggccagtgcgatgaccgcctcagcctcccggatgcaggcctcgatgaaatcgagctttgcggcgcggacgtccgcgtgcggctccgcctgtgcatcctcgcgccgcgccgccagttcctctatgatcgcgcgcaggccccgccgcaggagcgtgtcgtagtccgggcacttgtgcgacatctggatggagcacagcccgagctcctcgttcttgatgtagatgggcagcgcgcagcggatcaccgtgtcgtcggcacagcagctccccacaataaggtcgtacggctcgagggtgacgggcatctcgcgcatgacgcggtcaaaggccatggagcggcggatggcggcgctgcgcttctcgctgtccgcgtcgagcacggagaggtcgccgccccacattttctggcggcggcgcatgcggcggtgcagggtgtcgaagtgctggcggatcttcggcgtcatgccccgcagggcggggtcggttctggcttgttcaatggcgttttccacgattcttacctccgttaaatctattttgtttttattcgtgcaggacggcaaggccctcctgcgccgcaagctggttcagtgccgcgtaatggcttttgtcccgcggcacgcagccgtccagcgcgaaatcggcgctgatccacttgtatttttcgccgctcatggggttgtagggcagaagctgcatgcgggagacgcctagcccatgaataaagcgggcgatggcgcggatctcctccggcgtgtcgttgacgccggggatgcagggtgtgcgcaccgtgatgcgctccgcaaagccgcgcgcgcagagcaggcgcaggtttttcaaaatgacccggttatccgcgcccgtccagtaccggtgcttctcggggtccatgagcttcacgtcgaaaaagagcatatcgcagagctcggcgatgtccagaagcgccgccgtttccccgcagccgcaggtttcgagcagcgtgtgcaggccgaggcggcggcaggcgctgagaaaatctttcgtgaagcggggctgcatcagcggctctccgccgctcagggtcacgccgccgccggagctctgaaaaaacggcagatcccttgcgatgcgccgcgccagtgccgcggcgtcggcgtaaaagccgccggtgcgcagcgcgcggaaggcgcaggccgccgtgcaggcatagcagctttggcaccggctgcggtccacggtgatgccgggcggcgaggcgcttgggtccggcgaaattgcgccgtgagggcaggcgcgcgcacagcgcaggcagccggtgcagcgtgcgtgctggtacaggagctcgcgccggttcttctgcgattcgggcgaatggcaccagcggcaggaaagcggacagccctttaaaaagacggtggtgcggatcccggggccgtcgtgtgtggaaaagctgtccatatccagaatgaggccttgctcgcacattgaaaattcctcccctgtcccgtgccggcgggcacgggcgcttgttttctccattaaaccgcagggtgccgcaccgcgcaatgcacgcttttttcgatggggcggatattttgcgcgcggcggatgggcggtttttctgatgatgggcagaatgccgcttttgaggcggcgcgcgctgaaaatcccccgcccggcagacgcgcggtgcagggcagggggatgcggaataagaaggcggctctgcggcttttgagacggcgcaaaaaaaataaagaaggccgcagggcgggatacgcggtgtatccgccctgcggccttctgttttaaagacgttaccgcgccatgcggtagatcgccataatgtcctctttttggagcaccttgaacagcccgatcgtccggcggccgaaataggtgcatttttcggccatttcctcaatctgcgcgtcggtgaggttctcaatgccgagctcgcggatattggtcggcatatggatggagcggtagaagctctccatcgcctcgatgcccttgagcgccgtcgctttcgggtcgctttcgggcgcgatgccgaacacgttctgcgcgaactgcgcgaagcgcgcgggtttctcgccgagcacgtagcgcgcccagctgccccagatcgccgcgaggcccgcgccgtgcgcgacgccgaacatgccgctgagctccatctcgatctggtggctggcccagtcgccgttcgggccgccgcagcacatcaggctgttgtgcgcgaggctgccggcccacatgacctccgcacgggccttgtagtcggtggggttgtcccgcagcactgcgccgcagtgcaacacggtgcggatcaccgattccgccatgccgtccgtgacggccagcgtctcgtcctgcacgaaatagcgctccatgatgtgcatcatgatgtccgtcacgccgcaggccgtctggtaagcgggcagcgtgtaggtcagctcggggttcatcaccgcgaatttgcagcggcagacgctgttgttgtacccgcgcttgagctcgccctcgtccttggtgatgaccgtggaatcgctcatctcgctgccggccgccgcgatggtgagcacgcagccgacgggcaggcaggctgccgccgtgtttttgcggtcgaaaagatcccacacgtcgaagtcgtttgcgacgccgtagccgatggccttcgaggaatcgatgacgctgccgccgccgacggcgaggatgaaatcgacgccctcccggcggcagagctcgatgccctcgtagacgagggagagccgcgggttcggcacaacgccgccgagcgaaatgtaggcgacgccggccgcgtccagcgaggcgtagatccggtcgagcaggccgctttttttggcgctcccgccgccgaagtgcacgagcaccttgcggcagttctgcgcctttacgagcgcgccgacctcattttccgtccccttgccgaatacgacctttgtgggggtgtgaaacacgaaattgttcatgtgcgttcctccttgcaaaatggtgtgaaatatgcgttccattcaatccgattataaggcgcgccgcacggctttgcaagacgcattttttcaggcgaggcgcattttctcagaaagcggggcgcggagagcgggtggcgcccgcaagcccgtgaaaaaaaccgcgccggggatggaaaaatgccggccgctgtgctagaataaaaggcaaagacagagaaagggtgacggaagatggtattggaaagagtgacgccggaaagcgtcggcattcattcaaaaggaattctggattttatagacctcgccgagcggcgcggcctcgagctgcacagcatgatgctgctgcggcacggcaaggtgtgcgcagagggctggtggaagccgtacaacccggcgtcgccgcacatgatgttttcgttcacaaaggcgctgacctccacggcggtcggctttgcggtgcaggagggaaagctcgcgctcaccgaccggctgtgcgatctgttcccggacaagctgcccgaaaacccgagcgagaacctgcggctgtgcacggtgcgggatcttctgacgatgacctgcgggcatgcgacggagatcaacacgttcgacgtcgcgcagccggactgggtgcggaatttcctctcgcacgaattcaaatacaagccgggcacgtgctttatgtacaacacggccggcacgaacatgctctgcgccgcgctgaagcggcgcaccggcgaggatctgtttgcgtacctcacgccgcgtctgttcgagccgctcggtatttcggacgtcgagtgcttccgcctgcccgacggcgtggagatgggcggcgcgggcagccgcctgcggaccgaggacatggcgcgcttcatcctgttcgcggcgcagcgcggccgctgggcggacaggcagctgctcgaccccgcgtggttcgagctcgcgacctcgaaggcggttgagacgctgagcccggtcaacgaccccgatacaccggactggcgctgcggctacggcttccagttctggcgctgcgtgccggagcacgtcgtgcgtgcggacggcgccttcgggcagtacggcgtgatcttcgaggagaaggacacgatcttgattttgcagagcgcctccgcgcggcagcaggaccagcttacctgcgcgtgggagacgattttgccggcgatcacggacgaggcttcgctgccggaaagcccggtggcgcacgtgctgcgccaccggctcgagcgggcggagatccagccgatgctctcgatgcgcaatcgtgcggcggaaatgcaggccggcgggaagcgcttcgtgccggaaaaggcgatgccgggccttgccgatctcatcggcggcatctggatcgtcgcgccgcagggcgggaaaacgcaggccctgcgcctcgatttttcggatgacaaggccgtgctgaccgccgagcaggataacggcgtgttctcggtggacattggactcgagagccattttgcaatgtccgcgctctgcggcaggacgtacggcgcggtcgggcgctggcgcacggacacgtgcttcgaggcggaaatccgctgtgcggaatccgtcggcggcaagcgcatgctgttcggcttcgacggcggcagcctgacgctgcactgcgagtctacactgccgctttcgggcggaattgccgaaaagggcccggcggcctatgcgctttcggcggaataaatcggctgcggcgcggccgcgagaaaacggatgaggtgccgccggctgctgaagagtgaaatagaaaaaagaggaagcgtgcggaaattccgtacgcttcctcttttataatgggatccgaacgatccgcaatgattttttaaaatgggcgggcaccgtgcgtgccttaaacaaactggctcgggttcacgcgcgttccgttctggtagacctcgaagtggaggtggttgccggtcgagtttccggtgctgccgacatagccgatgatgtcgcccttgttgacccattggccttcataggcggcgacggagctcatgtgcgcgtacagcgtggagtacgtggagtcgtgatagatcgcaacgtagtagccccacgaatcaccccaggagtcgtagttgttcgctaccatgaccttaccggagcgggaagccacaatcggcgtgccctcgggggcgccgatgtcgaggcccttgtggccgttgttgccgaaatactgcgtgatgctgctgtgtccgtagcccggaagcggccactggaagctctcgctcgagtcgtagctcggcggggcgctcggcaccggggtgggcgtcggggtcggcttcacggtcggcaccggggtgggggtcggcgtcggctttgcctcgggtaccggggtcggtgtcggcgtgggcagcgggttgccgttctcgtcgtattccgtgtccggaaccggtgtcggcgtcggggtgggttcggcctcaggcaccggggtgggcgtcggggtcggctctacctcgggcacgggggtcggcgtgggcgtcggctgcgactggctgttttcctgctgctgcatctgcgcgatcaggttcgccatcatattcgcgagcgcatcctcctcctcggcggtgcgcacaagcgcctcgttggcctcgcccttctccgcgcggatctcctcgagcagcgccgtattctcggcctcgaggtcaataagctcgttctggctcgattcgagcagcttcttttcgtcggcgagcgcggtcttttccttttcaagctcctcgcgctgggcggcggtctcattcatataatcggaaacctgctcgatcagcatcttgtcgcggcgcgtgatgctcgaaaccatctcggtgcgcatggagaaatcgtgcaggctctccgcgttgaagaggatctcaagcgtgctcacgctgccggcggaatacagggcggacaggcgctttttcaaaagctccatcgtgtcctcgatttccgcttcggcgttcttcaggctttcttcaagcgccgtgatgctgtcgttcagcgtgtcgatgctgtccgtcgcggtgctgatctgcgtgcggacggtatcgattttttcggcgagcagcgcctgctcggcctcctttgtgctttcgtccgattcaagctctgcgatctggctttccagttcggcctttttctcggcgagggcgctctgcttcgcttcgatttcctccacggtgtctgcttgaacggcgagcggtgcggccgtaagcagcacggcggaaagcgccagagcggtcagacgggtgaagcgcttatgaaaatgcttcatggaatacctaccttcctttcagcgggaattctggtgaattctgtgtacagctccatatactagcgtttgtaattgtaaaccaaatcgcacgcggtataattccctaaaagaattaaacgcaaaaaactacaaaaaaaagacaaaatatttcaaaaggattacaaattcgcggcaaatagacttttaggcgtgcgaaaaattccggaaatccgctgtgcgaagagcgcaaaagcattgacaagctgcgggaaaaaaagtaaaatagcagcgagattaattagtttgtctaactaaattttcgagcggcttcgacatactgcggacacaaggggggaaggctgtggcggcgtttgcggcggatctgaacgagcttctggtcgagatttaccggaatatcgagatcctcgaggagagtgaattgaagaaaagccggctgaatctatcgatcagcgaaatgcacatgatcgagctgatcgcgaaggccgggggcggcatgacggtcagcgagatcgccgggcggctcaaggtgacgcgcccctcggtgacggtggcggtcaacaagctcgtgcagaagggctactgcgaaaagcggcggcgcgaggatgacggccgcgccgtggccgtcatcctgacgggcgcgggccgaaaggtggaggcgtttcacgcgcggtgccaccgcaatatgatccgcgaaatcagcgacgatctcacggagggcgaaaaggcggagctgctccgcacaatgtcgcgcatcaacacctatttcaggactaagatatgagaggatggcaacgatgagttttacaattttgggcacgggcagctatgcgccggagcatgtcgtcacgaacgacgacctcgcgcagctcgtggagacgaacgacgagtggatcacacagcgcatcggcgtgaagtcccgccatatcagcgagacggagacgaacgtggaccttgccgtaaaggcggcggagcgcgcgctcgaggacgcgggcgtcgcggcggaggagcttgacctgatcatcgcgacgacgatttccggcgacacgctttcgccgggcacgggctgcatggtgcagaagtgcatcggcgcgcactgtccggcgttcgatctggccgcggcgtgctcgggcttcctctttgcgctggaaacggcggcgggcttcttcgcgcgcggtatgtacaaacgcatccttgtcgtcagcgcggagcgcatgagcggcatcatcgactggacggaccgcggtacctgctgcattttcggcgacggcgcgggcgcggcggtgctcggtccgggcgaggggctcatcgcctcgcacctgatgacgaagggcggcgacgacgtgatcacgatcccgacgcgttacggctccccgtggtacaaaaacgagctgcccgaaaaaacgagcgtctacatgaacggccgcgagacctacaagttcgcggtgatggcgatgtcggataacattaaagagctgatgcagcaggccggcgtttccggcgaggatgtggcgctcgtgatcccgcatcaggcgaattaccgcatcatcaacgaggcgcgccggcgcattccggatatcgcgcccgagaagttctgcatcaacatcgatcgctacggcaacacctcctcggcgagcgtgccgattctgctcgacgagatgaaccgcgcggggaaaattcaccgcggcgatattctggtgctcgcggcgttcggcggcggcctctccgcggcggcgatgatcctgcggttctgagcgccgggcgaagcggcggcagaacgattataatagagatagaaagcaaaggcccggggcgcaaagcacagggcttcaaagtccgaaaggagtaaaaacgatgatttcaacaccgatttgtgacattctcgggatccgttacccgatctttcagggcggcatggcgtggatttccgacggaaagctcgccggcgccgtttccgaggcgggcggcctcggcatcatctccgcgatgaacgcagacgccgactacctgcgcgggcagatcaagaccgcgcgcgggctgaccgacaagccgttcggcgtcaacatcatgctgatgagcccgtttgccgacgaggtcgcgcaggtcgtggccgaggaaaaggtggctgtcgtcacgaccggcgcgggcaacccctcgaagtacatgaaaatgtggattgaggccggcatcaaggtcatcccggtcgtcgcctcggtcagcctcgcgaagctgatgcagcgcgtcggcgccacggcggtgatcgccgagggcggcgagagcggcggccacgtgggcgagctgacgacgatggcgctcgtgccgcaggttgcaagcgcggtgacgatcccggtcatcgcggcgggcggcatcggcgacgggcgcggcgttgcggcggcctttatgctgggcgctgtcggcgtacagctcggcacgcgcttccttgtcgcgagcgagtgcggcgtacaccagaactataagaataaggttctgaaagcgaacgacatcgcgacgatgacgaccggcaagcgcctcggccacccggtgcgcagcatcaagaacccgtacacgaaggagtatttccgccttgagtacagcggtatttccgacgaagagctcgaggcctacggccgcggcgcgctgtaccgcgcagccgtggagggcgacgaaaagacgggctgcttcctcgcgggccagattgcgggcatggtgaaccgcgagcagccggcgaaggagattatcgaggagatgttccgcgaggcggaggatgtgttgaatggagcggcaaaatgggtaaaatagcatttgttttttcgggacagggcgcgcagtacagcggcatgggcaagtccctttatgaagcgagccccgcggcaaaggcggtgttcgatacggcggagcagctccgcccgggcacgatcgcccagtgctttgaaagccccgtggaggagctgagcatcacgaagaacacgcagccgtgcctcttctgcgtcgatctcgcggcggccgcggcgctgcgcgaggcgggcgtcacggcagacgctgtagcgggcttctcgctcggcgaagtggcggcggtcacgtttgcgggcgtgttcacggcggcggagggcttttcactcgtcgtgaagcgcggcgaggcgatgcaggccgcggccgaggctgtggacagcgcgatggcggctgttttgaagctcgaaaacgaaaaggtggaggagctctgccggatgcatcaaggcgttttcccggtcaactataactgcccgggccagctcgtggtggcgggcctcaagtcgagccttggcgcttttatcgaggacgtcgcggccaacggcggcaaggcggtgcccttaaaggtgagcggcggctttcattcgccgtttatggagagcgcgtcgatccgtctggcaaaggtgctcgacggcatggacgtgaaagccccggctgtgccggtctacgcgaattacacggcggagccgtacgcggcggacaccgtgaaggcgctgctaacaaagcaggtttctaacccggtgcgctggcagcagaccgtggaaaagctgctggcggacggtgtggacacattcatcgaggtcggcgcgggcaaaacgctctgcggcctgatcaagcgcatgagccgcaccgcgaagatctacaacgtggaggatgcggcgtcgcttgcggcggcggtcgcggccgtcagggaggaagaaaaatgagtctgagtggaaaaatcgcgctcgtcacgggcgcttccagaggcatcggccgcgcgatcgcgctgcgccttgccgcagacggcgcgaacgtcgccgtcatctacgccggcagcgccgaaaaggcggaggccgtttgcgcggagatccgcgcgctgggtgctgaggcgaaggcgtaccgctgcgacgtcgcgtcggcggaggccgtcaaggagaccgtcaaggcggtcacggcggacctcggcaagattgacatcctcgtcaacaacgcaggcatcacgcgcgacaacctcgtgctttcgatgaaggacgaggactacgacgcagtgctcgacacgaacctgaagggcgccttcaatatgatccgcgcctgctattcgggcttcatccgcaagaagagcggccgcatcatcaacatctcctcggtgtccggcatcatgggcaacgcggggcaggcgaattacgcggcctcgaaagccggcctgatcggtctgacgaagtcggtggcgcgcgagctcgcctcccgcggcgtgacctgcaacgcggtcgcgccgggcttcatccagacggacatgacggagaacatcggcgaggacaacaccctgcgcacgatgatcccgctcggccgcatgggccagccggaggacattgcggcggcggtggcgttcctcgcgagcgacgcggcggcgtacatcaccggcgaagtcctgcgcgtggacggcggtctcgccatctaggcgggcgcggcccgcggcggatgtccgcgtagtcgcttgcgtgcgcaagctcgttttcgcgggaaaccggcgcggcgggcgcgttctttggacgctcccgggcgggcacggcgggcgcggcccgcggcggatgtccgcgaggtcgcttgcgtgcgcaagctcgtttcggcgggaaaccggcgcggaggtcgcgtcctttgggtgctcccgggcggacacggtaggcatatggatacaaggggcctaggccctgctacagatcatacagaaaggaaaaaggaaatggaaagaagagttgtgatcacgggtctcggcgcggtgacgccggtcggcaacgacgtggagaccttctgggaaagcctgaaggccggcaagtgcggcatcacgaagatcacgaagttcgattcctcggactacaaggcgcatgttgcggcggaggtcaaggattttgacccgcttctttatatggataagggcgagctgcgcaaaaacgacctgttcgcgcagtttgcgatggcggcggccacgcaggccgtgaacgacagcgagatcctcggcaagatcgatccggagcgcttcggcgtgtatttcggctcgggcatcggcggcatccagaccttttcgaaccagatgacgatgctcaacgaaaagggtccgaagcgcgtttccgcgtacttcatcccgatgctgatcgcgaacatcgcgggcggcaacatcgcgatcaagttcaacgcgcagggttcctgcctgccgatcacgaccgcctgcgccacgagcaacaatgagatcggcgaggcgtaccgcgcgattaagcacggctatctcgacgcgatcatcgcgggcggcgccgaggcggcgatcacgccgatcggcgtggcgggcttcggaaacatgacggccctgactccctgccccgacccggaggacgcctgctgcccgttcgataagcgccgcagcggctttgtcatgggcgagggcggcgcggcgctgatcctcgaggagtacgagcacgcgaaggcgcgcggcgcgcggatgtatgcggagatcgtcggctacggcgcgacggacgacgcgcaccacatgacggccccggaccccgagggcaagggcggcgcgcgtgcgatccgcatggcgttcgaggaggccggcgcagatctcgagaacgagaagatctacatcaacgcgcacggcacgagcacgccgctcaacgagcgcagcgagacgctcgcggtcaaggcggcgttcggcgcgcatgcaaaggacgtcgtcatcagctccacgaagtcgatgacgggccacatgctcggcgcggccggcgcggtggaggcgatcgcctcggtgctcgccgtgaaggagggcgtcgtcccgccgacgattaattacaaggagccggaccccgaatgcgacctcgatgtgtgcccgaatgaggcgcgccgcatggatatcgacctcgcgctttcggtttcgctcggcttcggcggccacaacgcctgtattgcaatccgcagggttttgtagtagaatattccaatatacaccggttgaaataaacggagggacgctttgtgaatgtcaaggatattgcggctctggcggaaatcgtccgcaagaacgagctgacgaaactggagatcgacggcgagcgtatcgtgatggagcgtgtgcccgcggctgtgcaggctgccgctgcggcagcgcccgcggcgccgcagacggtcgccgggcagatgcacgcggcggagccgatcgccgaggtgcaggagaaggagggcgcctatgtgcgcagccctgcggtcggcgtgttctacgcctccccctcgccggacagcaagccgttcgtcgccgtgggcgacacggtgcaccgcggcgatacgctctgcatcatcgaggcgatgaagctgatgaacgagatcgcgagcgacgtcgacggcaaggtcgtcgagatctgcgtcggcaacggtcaggtcgtcgagtacgatcagccgctgttccgcattgtctgacggcggggagaggaaagctgatgaacaaggaagagatcaagaagatcctgccgcaccgcgagccgatgctgctcgtggacgaggtggagcttgcggacggcaaatcgctcggcaagtgccacatccgcggcgacgaatactttttgcagggccattttccgggcaacccgatcgtgccgggcgtgattcagtgcgagatgctcgcgcagagcgcctgcgcgcttctgctcgacggtgcggtcgagggcatgaccccggttttcacgagcctcgacaaggtgaagttccgcggcatggtgaagcccggcgacacgctcgagaccgagtgcgagctcgtgcgccagcgcggcgcgttctactttgcgaagggcacgggccgcgtgaacggcaaggtctgcgtcacggcggaattctcgttcgcgctcgtcaaggcctgagccgcgcgtaggaaaggaaaggcagcagcatgtttacgaaattactcgttgcaaaccgcggggagatcgcggtgcgcatcatccgcgcctgcaaggagatgggcatccgcaccgtcgcggtctattcgaaagcggatgcggaatccatccatgtggcgctcgcagacgaggccgtctgcatcggcgaggccgcggcgaaggacagctacctgaatcaggagcgcatcgtcagcgcggcgatcgcatcgaaggcgcaggcgatccacccgggctacggtttcctcgccgagaacgcgtcgtttgcgaacctgtgcaagaagcacggcattgcgttcgtcggcccctcgggcgatttgatctcccgcatgggcgataaggacgcggcccgccgcctgatgcagcagtccggcgtgccgacgattccgggcaccgagatcctcgaggacgcggcggcagccaaagcggctgcggaaaagatcggctatcccgtcatgctgaaggcttcggcgggcggcggcggcaagggcatccgcctcgtgcgcgccgccgaggagatcgagcacgcgttcagcaccgcctcgagcgaagcgcagcaggcgttcggcgacgggcggatgtacatggagaaatacatatacccggcaaagcacatcgaggtgcagctcctctgcgacgagcagggcaacgtcgtgtgcctcggcgagcgcgagtgctcgattcagcgtaacaaccagaagctgatcgaggaatccccctcgccgggcgtctcgaaggaaaagcggcgagagctgtttgaggcggcggcgaaggcggcgaaggccgtcggctatgtcaacgccggcaccgtcgaattcctgatggacagggacaagaatttttatttcatggagatgaacacacgcctgcaggtggagcacccggtttcggagcttgtcaccggcaaggacatcgtcaagtggcagatccgcatcgcggcgggcgtcgagctcgactgcacgcaggacgacatcaaggtgcgcggcgcggcgatcgagtgccgtatcaacgccggcggcgtgggcaaggtcgatttcctgcacatcccctccggcccgtgggtgcgcttcgacacgttcctctatcagggctacgaggtgccgccgttctacgattcgatgctcggcaagatgatcgtgttttcctccacgcgcgaggaggctatccgcaagatgcagtccgccctgtgcgagcttgtcatcggcggtctgccgaacaacatcgagaaccagatcgatatcatccgcgatcccgttttccaaagcggggattattataccgacttcatcaaaaaccgcgagggctgagggggcgctgagccgcccggcaaaagcccggatgcgtgcaaccgaagggagaaaccgctatgaatctgatgggcctgttccgctcgccccagaacgagctggaaaagggcggcaagcagccgaaaaacccgcaggaggaatcgcatgagatcacgatgacctgcccgaaatgcggcacacaaacacctgtttcggagctttgggatacgcagaacgtctgccgctgcgggcatcatttccgcatgacggcgcgccagcgcatcagcttcctcgcggatgaggacagcttcacggagctggacggcgacatgacgagccgcgatatcctgaattttccgaactacgagaataagctcaagagcgcgagattttccacgcgcgaaaaagagggcgtgctctgcggcacgctccgtgtggagggcgagccgtgcgccgtgttctgcatggatccgcactttatgatgggcagcatgggcacggtggtcggcgaaaagatcacgcgcctgtttgaatacgccgccgcgcaccgcctgccggtggtcggcttcacggcggcgggcggcgccagaatgcaggagggcatcctctcgctgatgcagatggccaagacgagcggcgccgtgcgcctgcacagcgacgccggcctcttttacctgaccgtgctcaccgacccgacaaccggcggcgtgacggcgagcttcgcgatggacggtgacgttattatggcggagccggacgcgatggtcggctttgccggcgcgcgcgtcatcgagcagacgatccgcaaaaagctgcccgagggcttccagcgcgcggaatttctgctcgagcacggctttgtcgatctgatcgcgccgcgcaaccgccagcgcgcggtgatcgcgcagcttctccggatgcacgacgccggaaagcagggcgtctgcacgagcgagagcgaggaagaaacggagggcgaatcctgatggcaacggcgtatgaaaaggttcagctcgcgcgcggcaagggccgtgcgacggggctttcgtttatccagaatatttttacggatttcatcgagctgcacggcgaccgccgctttgccgacgacccggcgatcgtcggcggcatcgcgcagctcggcggccgcaccgtcacggtcatcgcgatcgaaaagggcggcgatacgcgtgataaggtctaccgcaacttcggctccccgaacccggagggctaccgcaaggcgctgcgcctgatgcatcaggcggagaaattccgccgcccggtcgtctgctttgtcgatacctcgggcgcgttctgcggcatcggcgcggaggaacgcgggcaggggcaggcgatcgccgaaaacctcatcgagatgatgggcctgaaaacgccggtgatctcggtgctgatcggtgaaggcggctccggcggcgcgctggcgctctccgtggcggaccgcgtgtggatcctcgaaaacgccgtgtattcggtcgtgtcgcccgagggctgcgcgagcatcctgtggaaggacgcgaagcgcgcgaaggacgcggcggagtgcctgcggctgaccgcgcaggatatggagcagctcggcgtcgtcgagcaggtcatcagcgaggaggaaaagggcacggtgttcgcccgcgtcaaggcaatgctcgaaacagagctcgacgccctgtgcgaaaaggacggcgataccctgctaaaggagcgctacgcgcggtttcgaaaatattaaaagcgcccagtcagaaccggggcaacgcaaaagaaagtctgagcgctcggactttcttttttgtttcaacgctcgcgctcctttttacggaaaacggagagaaaatcgcggaaaaacacgctatgaatggggtatcaaattcatataagtaggaggtttttatggtcttggaaaaagaagtgtcaaaagatttggttctggagaatattattgcgaatgcggtcaagatccccttagttaaagtcaaccgaacgacgtttttatcggaaaccttctccgacggagatgtgccggtagaggatgtggtggaactggggccggtcgcagcaggcgttccaagagaaagacttttggccatgtcgaaaagtctgattcttaagcggaccagccaatcttccgccgcatcttttgtggcaggaattccaggcgggctggccatggcagcgacagttccggccgatattctgcaattcttcggtatggcgcttcgcttggcacaggaactgtcttatctgtatggcgcgcaggatctgtggtcggacaacgcggtggatgatgagcgggtcaagtcccaactgattatgtattgcggtgtgatgttcggcgtttccggcgcggtgtctggtgtgcgtgtcttgtcggcacagattgccaaaaccacgctgaaaaagttgccccagaaagctttgaccaagacgatctggtatccgattgtcaagcagattgcgaaggcggtcggcgttaaggtgaccaaaaccacggttgccaaagggatttccaaggttatccctattgccggtggggtgatttccggcgggttgaattttgcgtctatgcttccgatggccaatcgactgcaaacggctttggataaggcaaattttgattacacgcaggaagagctggaagcggacgtcgaagaaatggagacctttgccgtgcagggtgtgcaggaagaaaccgagccagacgtaaagagaatgccggagaaattctcgaaaggcattaaaagtgtcggcgcgggcatttcgtccgtattctccaagcataaggagatgacgtcggcaaacacggaaaatgtgctggaaacattggaaaagctggcgaacctgaaagattccggcgtgctttctcaggaagaatttgaggagaaaaaggtggagcttctgaaaaaaatataaaacagagaatacaccatatatgtagaaaaagagctaaacgcactcgcttcggatagcgtttggctctttttatagctttttgtgcttacacagtctcctccccgaacacctgcccggcggcctcctgttcgaactgcttgttgtacaggtcggcgtagtagccgcctttttcgagaagattttcgtgcgtgccctgctcgatgatcttgccgccgcggacgacgaggatcaggtccgcgtggcggatcgtcgaaaggcggtgcgcgatcaaaaacgaggtgcggttttcgagcagcgtcgagatcgcgtgctggatcagctcctcggttttcgtgtcgatcgaggcggtggcctcgtcgagcacgaagatgcgcgggtcggcgagcacggcgcgcgcaaacgagatgagctgcttttcgccggtcgagagctggtcgccgccctcgccgacatcgctgtcatagcccttgtccatgcgcatgatgcagtcgtgcgcgctgacgagcttcgcggcggcctccacctcggcgtcggtcgcgtcaagcttgccgtagcggatgttctcgcgcacgctgcccgaaaacaggtgcggcgtctgcaaaacatagccgatgctcgagtgcagccacagcatcgagcgctcgcggtagtcgcgcccgtcgatcagaatgcggccggcggtcggctcgaaaaagcggcaggcaaggttgacgagcgtcgatttgcccgcgcccgtctcgccgacgatcgcgacggtcgtgccggccggaatgtcgagcgagaagtgctcgagcacgttttcggtgccgtccgggtagcggaaagtcacgtcgtcaaacgtgatgcggcccgtgatcggctcccagttctcgcgcttcggctcaaacgaggtgccgtacttttcgatgacctccggcgtgtcggtgatgagtgccgggcgctccatcagcgcggagacgcgctcgatgttcgcctgcgtcgcgataaaattcgagatcgtgcgggcgagctgctgcaccgggtcggcgatcacgagcgcataattgatgaaaacggtcatgtcgccgaccgaaatgtcgccgaaaagcaccatgctgccgccgcgcgtcaaaacgagcgcgacgccgatcgcggtcagaaagccgatgatcgggatgtagacggcgttcagccatacggcgtggatcgtcgtgcggcgcatgtcgtcggtcacggcgcggaaggccgcgtcgttcttatcctcgatcacgagcgttttcgaggtctttgcgccggaaataccctcgttgtagtggcgggttacctcggcgttgatcgcgcgcacgcggcggttgacggcgaggatcttcttctggaaaatgaccgtgaacaccgcgatgaccgggatgattgcgatcaaaatcagcgcgagcttccagttgtaggcgagcatgacgaagacgcagccgatcacgtacgcggcgctccagaagatgtccacgaggctccaggcgagcacggtgccaatcttgttggtgtcgctcatgacgcgcgccatgatgcggccgaccggcgtcgtgttgtagtaggaaaaatcgagcgtttgcagatgctcgaacagacggcgcttcaaatctctgccgagatacatctccaccttcagggcgaaaatcgccatgaggatcgtggaaagcgtcatcaggacgacaagcagaacgtagagcaggataaagggcacgataccctccgtggtgcccggctcgatgaagtggtccaccgcgtagccggaaaaaagcggctgaatggtgtcgatgcccgcgccgagcagcatcgtggccacgatcagaatcatgtgctttttgtacggggcgagaaacggcaggagtttcgcccacgtctgtaaggatttgcttttgattttcatatgtaaaattctccgaatgcgcccttatgtggcggagcgctgggtgtcgtagatgcgtttgtagatgccgtccgttttggagagcgtctcgtgcgtgccgcgctgcacgatgcgccctttatccatgacgatgatctggtcggcattcatgatggtcgtgatgcggtgcgcgatgatgatcgtcgtgccgcgcacgtttttgttgatggattcgcggatcttcgcgtccgtttccatgtcgacggccgagagcgagtcgtcaaagatcttgatcggcgtgtcctgcatcagcatgcgggcgatcgcgacgcgctgcttctgcccgccggagatcgtcacgccgcgttcgccgatctgcgtgtcgtagccctcggcgaagctgccgatcgtatcgtcgatgacggcgagccgcgcgtattcgcgcacgctttcgaggtcgtggcggtcggagccgtccgaaatgctgtccttaaagctctttgagaacagaaacggctcctgcaaaacgatgccgatgtgccgccgcagatgcgcgagggagatgttccggatgtccacgccgccgattgtgatcgtgccggcgccctccggcagttcgtagagccggtcgagcagataggtcagcgtgcttttgccgctgccggtcgagccgagaataccgagcgtcgtgccggccggaaccgtgaagctgatgtcgtgcaggacttcgccggtcgtgccgtaggagaaattgacgtttttaaacgcaatgtcgcggtccatcggcggctccaccgggttttcggcgtcgcgctccggctcggcgtcgagaatctcgaaaaggcgcttcgagctgatgccggtcttggagagctcgctcaaaaggcggccgagactgcgcgtcggccagacgagcatcgaattgtaggcgatgaacgcgaggtactcgccctcggtgatcgcgccgtcgacgacgaagaagatgccggcggcgaggatcgtgatgacctgtaagccggagagcaggtcgccgaggccccagttgaggcccatcacgcggccgagccgcacccacatgtcggagaacaggtcgttctgccggttgaatttgtccttttcaaagcgctcgcggccgaacgcgcgcacgacgcgcacgccggtcaggttctcctgcacgatcgcggtcagaacgccctcggcctcatcggcaacgcggaaccggttgccgacgatcacgaagaaaatcagcgagtagccgacgacgatcgggatgaagatcagcgcgatcagcgccagcggcacgttcatcgagaacatcagtgcgagcgaaacggcgatcagcacgatcacgcgcacgagctcgagaagctggtcgctgatgaagttgcggatcaggtcgacgtcctgcgtgcagcgctggatgatgtcgccggtctggttcaggttgtgccacgcgtagggcagccgctgaatgtgcgaaaacagcgtgtcgcggatgcgcgtgaccgtgccctcgcagccctttgccatgtgcaggcgtgagagataggtcgtcacgccggagagcacggcgaaaatcagcgaggccagcgcgcagagcacgatgttctgccgcaggaattcccgcccgccgagcgcttcgatccagctcgtcaggaaccccggcagattgaacggcgtgtcgttgatgaccgagtcaaccgtgacgcggatgacctgcggggtcatgtagtttgcgaaaaccgcaacgatgatggagacgagcgccagaatgaaatggcggcgcagccccttcgtgaacggcataaaccgcagaatgcttgtgtgttttacttccttcttcacaaaataccagcctttccgatgggcgcggccctcctcgggcggcccatctgcgccgtgccgattgcacagcgaagccgggtgcgggcttagcccgcaccctttacagcgaaatatgcggcgccggaaaacacggagcccggcgcctgtatgacggtactatcactttagcatggaagctctaaaaagtcaacgggtatgcgcataaattgtgtgaaatatggaatgattcttaaggatttgttcagaaataccccttgctttttgtgcggcggcgcattataatagggataaatctagttttaaaaaccatgtaaaccgattttaaaataatttaagaaagctgtaagaaccagcagaacgcgcacaaaaggcgcggcaaagcaaaaggagcggtgatcgtatggcaaacacggcattggcgcgtccggcccggcgggtttggcgcagggaggaccgcgagcggctctcgctgccgctttattcgctcggcgaggagattttttcggcggtttcgcacggcgcggcggcacttttcggtgcggcggcgcttgtgctgctgcttgccgcctgcaaaaaaacgccggtcacggtggcaagtgtcagcgtgttcggcgggacgatgattctgctctacacggtttcgacgctctaccacgcgctgaacgtcaaccgggcgaagcgcgtgttccgcgtgctcgaccactgcacgatttacctgctgatcgccggcacctacacgccgatcacgctctgctgtctcggcggcacggcggggctcgcgctgttctgcgcggtgtggggcgcggccgtgctcggcatcgtgctgaacgcggtcggcctcgagcgcttcaaggcggtctcgatggtctgctatatcgcgatgggctgggcggtcgtttttgcgctgggcgccgtgctcgagaacatgtccgccgcggggctgtggtatccgctttcgggcggcatcgcatacacggccggcatcgccgcgtacgggcttgggcggaaagtgccgtatatgcacgccgtttggcatctctttgtgctgctcggcagcgttttgcacacggcggctgtttacacgatcgtcgtttgagtgtatactaaaaaggggcgcgccgggcagcttgcccttcccgtggggagcgcataaaaattgaaagggctgaaaatcgtgagatcatccgaatttacctttaattcctgtacggcaaaaaataaaattttcacgcggctgtatgagccggatacgccgccggccgccgtcctgcaaatttcgcacggcatggcggagcacagtgcgctttacaggccgttctgcgaatatatggcgcagcgcggcttcgccgtcgcggtcaacgaccatctcggccacgggcgcagcgtcgcctccggcgcgctgtacggccatttcggcgaccgcggcggcctctacaacgtcgtggaggacgtgcgcaacctccagtctgttatgcgggaaaaataccccgatctgccgtattttctgatggggcacagcatgggctcgttcatcgcccgcgaatttgcggcggcgtacggcacctcgcttacggcggcggttttcatgggcacgagcgccggcatcccggagggcgtctggcgtgcggagcacgcgtacctcgagatgctgaaaaagtcgaaggggccgcgggcaaagctcccgcacctcgcgcggctcgcgaccgggccgtacaacaagaagttcaagccgaaccgcacggaatttgactgggtgacgagcaaggaggaggaagtggaccgtttcgtgaacgatccgctctgcggctttccgctcacggtgcagggctacatagaccttggcgcgctgctgcacgccgtcaacagcgacgaatggtaccgccgcctgccgaagaagctgccggtttatctgatctccggcgagagcgacccggtcggcggcatgggcaagggcgtgcggaaaatcgagaagaagctgcgtgaaacggggcacgacgtcacgatgacgctgtacccgcgggtgcgccatgcgctcgtcacagaggtgaacgccgaccgcgttttcgcggacgtttacgcgtttttggccgcgcacctgccgaaaacggattgaagaaaatccgcccgcggcgcggaagcgaagcgggcggcgaaaggaaaaggacgcggacagatttctgtctgcgtcctttttgcctgcagtgcgtccttggctgcgttatggctgaaatgtctcaggcaaatgcaggctgcggcccggtgcagacgccgcggcgtgaacgacgagactccgcccccgcgtgtatgcggcggaggcggctccctcttccacgaggggaatgcggcgaatcgcttcaaccggtttcgcgccgaatgaagcggtcagcgtaatgcttttgccctcctcggtgttttccggctctgtctcggcctgcggcatggcaatatgcggcgcatcggcttcgcttggcagggcgggtgcggcggagagcgaaacggcgagcgccgcgcagagagaaatgcaaaggggcttgaacataacggtcaccggcctttcctttaagatgtatttattttaccacaaaacgcctgcgccgtaaagaggagcggacggcgcggggcgcagcctgcttctgtatgcgcgctttttggcataaccggcctgtacgcctccatatattgagctgtaagcgcagaaaggcaggcggtttttcatgtatggggtcgtaaatttgaagcggtggctgcgggtgacggcggccgcggtgctcgccgtcggcgtgctcggcgtattcggggcgctgctccgggttttcgcggcggaaagcggcgtgcagctgccggtcatcatgtaccacgcggtcatcgacgacagcgggcggctcgggcagtacgtgatctccccggcggagctcgaaagcgatttcagatggctgcaaagccacggctacacggcggtgctctctgaggatctgctccgctatgtggaagatggcacgccgctgccggagaagccggtgctcatcacattcgacgacggctactacaacaattaccggtacgcgttcccggccgccaagcagtacggcatgaaatttgtgctctcgccgatcgggcggtgcgcggacctgtacaccgaggagccgagcgaaagccaatactacgcgcactgcacgtgggaaatgatgcgcgagatgcaggattccggcatcgtcgaaatcggcaaccacacgtacgacctgcacagttccgacggctcccggctcggcacgcggcggctttccacggagtcgatggagacgtaccgtgagatgctgagcgaggacgtcaacctgttccagaagaaggcggaggaaaacctcgggcgcgcgcccgtgctgtttgcctacccgttcggcgcggtcagcgagggcgagccggagatcatcgcgtcgctcggcttttcggtcacgctgtcgtgcgaggagaagatcagcaccgtcacgcgcgacccggagagcctcgtgtatctcgggcgcttcctcaggccctcgggcgagacgagcgaggcgtttttcagccgcatgctcggcagcgcgggctgacgcgcggccggaaaaggaggtggtgcgcggcgccctgtggcaatccattcaattcgatcagaaaggcgtggtgacgcatatgccgtcgatttatctgagtccttccctgcagccctataacaaatacgttacgaccggagacgagcaatactggatgaatgtcattgcggacgatatggtgccgatcctagagaaaaacggcatcgccgtcacgcgcaatacgccgggcatgacgctcgggcaggcgatccggcagtcaaacgccggggattacggcctgcacctcgcgctgcactcgaacgccgcgccggagagcctttccggcaagctgcgcgggccggacgtctactactatccctacagcaccgcgggcaagcgcgccgcggacatcatcgccgataatctgcgcagcatctaccctgacccggacctcgtcaacacggtcgtgacaacgaagctcgcggagatcaccaagacgaacgcgcctgcggtgctcgtcgagatcgcctaccacgacaacgtgcaggacgaggcgtggatccgcgagaatacggagctgattgcccagaacctcgcgctgtccgtctgcgagtttttcgggctgaactgcacgctgtgagcttcgttcgaactgtgctctgggggccgcacgtcctgctgctgattctcgcggcgggcgtgtggttcacgctgcgcgggcggttcatgcagctttggaagctgccgcgcatggcggccggggcgctgcgcggcgaaggggaggctggggaaaggatctcgccgtttcaggcgctttcggcgtcgctcgccggctcgctcggcacgggaaacatcatcggcgtcgcggcggcgctcacggccggcggaccgggcgcggtcgtttggatgtggatctcggcgttctttggcatgatgaccgtctatgcggagggcgtgctcgcggcgaaattctccacaaaggaggcgcccggcgcggtcggctacgtccggcgggcgctcggcggacacgcggcgaagctgtacgccgcgggctgcgtgctctccgcgctcggcatgggcacgatggcgcagaccggcgcggtttccgcggcgctcggcaccgtcggcgtgccgccgtgggcggcgggccttatcgtggcggttctgctcgtgctctgcgtgcgcggcggcctgcaaaaggccgtgcgcgtcaccgaaaagctcgtgccgttcatggccgggctctttctcctcgcctgcggggccgtgctcgtgctgcgcgccgagcggattcccgccgcactggagaccatgctgcgcgaggcgtttaccctgcgcgccggggtcggcggtgccgccggtatgctgaccgcgctgcgcgtcggcgtgtcccgcggcgtgtttacaaatgaggccggcctcggcagcggcacgttcgcgctggcggcggcggacggcaaaacgccggagcagatcggcacgcttggggcgatgcaggtgttcatcgacacgatcgccatgtgcacggtcacggcgctctgcctgctcgtttcccccgcggcgggcgacggcgcggcgcagacgctcgccgcattctccgcggtgctcggcggcgctggccgcgcggcggtttcggtttcgatggcgctgttcgcgtttgcgacggtcgttgcgtggagctgctacggcatggatgcgctgcgcttcctcgcacccgcggccggggaggccgggcggcgcatctacgtgtttttcgctgccgcctcgtgctttcttggctgcatcctgccgtttaccggcgtgctctccttctgcgacgcattcaacggcatcatggcggtgccgaatgtgctcgccctgtttttgctctcgggctttgtgttcggcgggaaaacgggagagcgcgaaaatcttcatcggaaatttgcgcaaaatacgaaaaaactatagattttttttcgtcgcagtgataaaatgaaagtgacccgcaggccgcagtctgtgggtaaaatgccaaatcaggcagggttgaaaaacaaaggaggcaatatccatgaaattgatacttgcaatcgtcagcaacgacgacagcggcgcggtttcctctgcgctgaccagaggcggcttctccgtgacgaagctcgcgacgaccggcggctttctgatggccggcaacacgacgtttatctccggcgtcgaggatgagaaggtggacgaggtgatcggcgtgatcgcgaagcattcgagccgccggacgcagatcgtcccgagcacctccacgatggacgtgggcatgtattcctcgttcccggttgaggtgacggtgggcggctccacgatctttgtcctgaacgtcgaccgtttcgagaaggtctaaatgcagtttggagattttgccggcaacgcggcgctgaaaacggcgctttcgggcgctttttcccgccgcaggctgccgcatgcgatcttgctcgcgggcgaggcggggcttggaaagcgcacgctcgcccggcagatcgcgcgcgccgtcgtctgccgcagcgcagaccgtgcggcggcgccgtgcggcgtctgcccgtcctgcatccgctcggcggccgggtcgcacccggatatccgcacagtcaccggcagcggcgcgtcgaattcgatcagcgccgattccgtggagcaggtgatttcggacgcgtacaagcgccccgaggaggccgacgcgagcgtctacctgttttttattgaaaacggcatctcggatgcagcgcagaacaagctcttaaagctcattgaagaaccgccgcccggcgtgatttttattttcacagcgccgtcggcggatcttttgctgcccacaatccgctcccgcgtgcagaccttcacgctgcgcgcgccgtccgagcgggaggcggcggcctatgcggagcggaaggcagggctttccgccgaggaagcgctggcgctcgccgctttgcaccgcggcaatatcggccgcatgctttcagacggcgaaaacggccgggcaatgaaggcggcgcagctcgccgaggcgattgcgctcgctgtttcggagggcaccgagcacgaactgctcgcggcttcggcgccgctcatcaaggacaagccgctgtttttggagacggcggagcgcatacagcttttgttccgcgatgcttgcatgctgaaaaacaacgtgcaggccgtgtccgccgcgacgcttgacacggcgcagcggctcagccgccggctttccgtcaaaagcctgatggctttgtgcggcctgagcgcgcagtatgcgggctatgtgaagcgcaatgcgaatatggcgctgctcgtcacggcgttctgcgcgaaaatgagagagaccgcgggcaaatagcccgctttcggatataaggaggaactgacatggctgaagtgatcggcgtcagattcaaaaatatgggcaaggtctattactttgacccgaacggcggcaggctcgccgccggcgaccgtgtggtggtggaaacggcccgcggcgtcgagtgcggcgaggtggcgatggaaaaccgcgacgtggcggacgacaccatcgtgcagccgctcaagaaggtgatccgcaaggcgacgaaggacgacctgcgccgcgtggcggaaaacgagctcaaggcgaaaaacgctttcacgcagtgcgagaaaaagattgcggagcgcgggcttgagatgaagctcgtcgatgtggaatacaccttcgacaacagcaagattttgttttacttcacggcggacggccgcgtcgatttccgcgagctcgtcaaagaccttgcgggcatgttccgcacgcgcatcgagctgcggcagatcggcgtgcgcgacgaggcgaagatgatcggcggcctcggcatctgcgggcggccgttctgctgcggctcgttcctcggcggtttccagccggtttccatcaagatggcgaaggagcaggggctttccctgaatccggtgaagatctccggcacctgcggcaggctgatgtgctgcctgaagtacgagcaggaggcgtatctcgacctgctgcgcactacgccgaaggtgaacgccgtcgtctccacgccggacggcaagggcgtcgtcatcgaccaaaaccttctgaccggcaagctgaccgtgcggctcgataagagcccggaggctgcgccgggcgtctataaggcgcgggacgtccgcgtgatccgcgacgggcagatcaagctgaacaagaaggagatcgaggcgttcaagaagctcgagaagtaagcgcgtgggacggcggcaggctcatcggctgtgcccgcgctttgagcggcctgcattttcgttccgtgctgcatgacgctgcggtgtgccccgcgtatcagaggtggagtaccggcagcgcgctggctcaccggtgtgttggagcctacccggattccgagcggctcgtgcagaccgataccgcggcgggcttttgcgagaggctgggcttttggctgggcggcggcgcatttttaacgcggccgtcgaaatggttttaatcggtattgtaaattttcggcaaacaggcgccctctggcaacattttgtccttgcatttttgcggatttgtgctagaatgtaggtatcaaatatatggaggtgtcctgttatggcatatacaatcacagacgcttgcatctcctgcggcgcgtgcgcggacgcatgtccggtcagcgcgatctccgagggcgaaggcaagtatgtaatcgacgaggcgacctgcatcgagtgcggtgcatgcgccgatacgtgccctgtttccgctccggagcaggcgtaatcgtttgcagaatcagaaaagggctgacgcgttccggcggcagctccttttttgtttcggcgggctttcggcctgcggggaaaccgtgcggccgtttccgcctattttgagaacaaggaggatccgccatgcgggaaggtgaacactgggagccgctctcgccggactgccgcgtgttggtgagccgcgcgcaccgctttacaaccgatacgattctgctcgcgcactttgccgcgccgaaaaagtgggagcgctgcgcggacctcggcaccggctgcgggacgatcccgctgctctggcacgcgcggtacgccccgcgggcggtcaccggcgtcgagctagacgccgacgcgctgcggcaggcgcaggcgtccgtcgaggagaacgggctcgagggaagcgtcacgatccgaagcggcgacatccgcagcatccgcgccgtttttccggagccggtgctcgaccttgtcgcctgcaacccgccgtacaaggcggtcggcgccggcctgcgcaatgcggatgcgcgccgggaaaacgcgcggcacgagtgcacctgtacgcttggggacgtcgcgcgggccgcaaaggcggtgctgcgcttcggcggcaggctgtgcatctgccagcggcccgagcggctgacggacgcgatggcggcctttcgggaaaacggcgtggagccgaagcggctgcggctcgtggagcagcggccgggcagtgcgccgatgctatttctgctcgaggggcggcgcggcggtaggccggggcttgcgcttctgcccacgctgcgcattgaagcggcggacggcggtttctcgcccgagatgctcgagatctacggcgattacaagacgggacacacataacgggcgcggcggggcgcaggccccgcacggcagccccagtcaggaacggtgaaaaaatggaaaataaactcgaaaaggccgcgctgtacgtggtgggcacgccgatcggcaatctctcggatttctcgccgcgcgcggctgaaacgctggcggcggtcgatttcatcgcggcggaggacacgcgcgtcacggtgaagctcttaaaccacttcggcatcaaaaagccgcttgtcagctactacgagcacaacaagcaggagaagggcagcgtcatcgcggatcgaatggccgcgggcgagacgtgcgcgcttgtctccgacgccggcatgcccgcgatctcggaccccggcgaggacctcgtcgcgctgtgcgcggcgcgcggcatcccggtgtacgtcgtgcccggcccgagcgcggtcgtttcggcgctcgcggtttcgggcctgccgacgggccgcttcacgttcgagggctttctgagcgtcaacaaaaagagccggcgcgagcaccttgaatcgctgcggggagaggcgcgcacaatggtcttttatgaggcgccgcacaagctgctcaacactttgcaggatatggaggcggcgttcggcgaccggcgcatcgccctcgtgcgggagatcacaaagctccacgagcagtgcatccgcacgacgctctcggccgcggcggcctactacgccgaaacgccgccgaagggcgagtttgtgctcgtaatcgagggcgcaaagcccgccgaaaagcgggagatgacgctcgaggatgccgtggcgctcgcgcgggccgcaatggaaaacggcagcgcggcatccgatgcggcgaaggaggcggcgcggctctcgggcttcaaaaagggcgagatctacaggcgcttgatggaataaaggcggcgcgcggcgggggaccctgcgggtgcggcggagggagagcccgcggtgaggcgggcttcaggcgaggggcggcatgccccgaaaggcggtggtgaccggtatgaaacggatcttagtggtcgatgacgaccagcacatcggaaatcttctggaggaggcgctccgggcggagggctacggcgtttcgcgcgcgtactccggcaccgaggcgcagctccttctggagcgggaaaagcccgacctcgttttgctcgacctgatgctgcccggcctctcgggcgaggcgctgctgccgcggctttcgggcatcccggtgatcgtcgtcagcgcgaaggccggcgtggacgacaaggtgaagctgctgctcggcggggcggcggactacgtgacgaagccgttcgttctgcgcgagctgctcgcgcgggtcgcggtgcagctgcgcgccgcgccgggcgcggacgccgcggtgctctccgccggcggtctgcggctcgacgtgggcgcgcatgcgctgaccgtcgacggcgcgcccgtgcggctgacgaaaaccgaatacgccattttgaagctcctgatgcagaacgcggaccgagcggtgtcgaaatccgtgattctcgaccgcatcagcctcgacacgcccgactgcaccgacgcgtccttgaagcagcacgtcagcaacctgcgccgcaagctgcgcgaggccggcgggcgggaatacgtcgaagccgtgtggggcatcggcttccggcttgccgccggctgaaatcttttctttttctttacgcttttcttgaccgctcgctttaccctttcacggtaaaatggcctaaagaaaaggaaaggagcaatttttggatggaatactgtttggaaacgcacgtgctctgcaaggaatacgggcgctttaaggcgctcgacaacctgacgatgcacgtcccgaaggggtcgatttacggctttgtcggcaaaaacggcgcgggcaaaacgacgctgatccggctgatctgcggcctgcaggcgccgagcgcggggagttacttcctctgcggcgtgccgaacacggagaaagcggtctgcgcggtgcgccgccgcatgggggcggtcgtcgaaacgccgtcgatctacatggatctgcccgccgaagaaaacctccggcagcagtaccgcgtgcttgggctgccgtcgttctcgggcatccccgcgctgctcgagctcgtggggctcagggacaccggaaaaaagaaagcgaagcacttttcgctcggcatgcgccagcggctcggcatcgcgatggcgctcgcgggcgaccccgatttcctcgtgcttgacgagccggtcaacgggctggacccgcagggcatcatcgaggtgcgcgagctgattttgaagctgaaccgggagttcggcatcacggttttgatctcaagccacatcctcggtgagctttcgaagctcgcgacgcactacggctttatcgacggcggccgcatggtgaaggagatcagtgccgaggcactcgaggccgcctgccgcaaatgcgcgcggctcacggtcagcgacgtgcgggcgctcgcgcgcgtgctggaccggctggggcttgaataccagattatctccgaaacgcaggccgatgttttcggcacggtaaacgtcacgcagctcacgctcgcgctcgcagaggaaaactgcgaggtcaccacgatgcaggagcgcgacgaaagcctcgagagctactatgtgaatctggtgggaggtgagcggggtgaataaactgctttccgcggatttcacgcggctttggaaaaacaaggtgttttggctcggcgcggcatgtatggcgctgcttgcgtgctggataatctgcatcggttacgggcagaatgtccgatgggcagacgacgacatcggttttgagccgaaccggctggatgcgtatctgtttcagtttgcgccgatgatcggcggctttgcggcggtcatcatcagcctgttcctcggagcggactacagcgacggaacgatccgcaacaagctgatcgttggcagccgccgcagggacatctatctctccaatttggtcgtctgcacggcggcgagcctgatttgcatggcggcatatctgatctgcgcatttgcggtcggcatcccgctgctcggtgtgccgaccgccgacgcccgcatggtgctggcctgcattctgctctgcgtcctgttcaccacagcgttttcctctatttttacgatgctgggtatgctcaaccacaaccgggccggcgcggcggtgctcgcgatcctcgtctttctggcgctcctgtttgcggcgagctactgctataatctgctgcaaattcccgagatgtcgtctgccgcgatctttacggcgaacggcatggaggttggcgacccgcagccgaatccggattatgtcgagggcgaaatgcggaacgcgctgcaatttatcgtcgattttctgccggccgggcagggcattttgattgcgagctatgagggggtgcacctgtggcagatgggggtttactccgtgctgatcacagcggcaacgacgcttctgggccttttcggcttcagccggaaggacatcaaataacataggagaggggctggattccgtggaatggattttatgggcggctgccgtcctgctgactgccgttgtactggcgcttgccgtaaagatacacctgctgcgcaggtctgcgcgggagatcgcggcggggctctccatgcggctttccacggatacgaacacgctgatcggcatctcctcccgcgaccgcgcgatgcgcgcgctggctgaaagtatcaacaccgatctgcgcgccctgcgccgggagcgccgccgtttgcagcagggggaccgcgagctgcgcgaggccgtgacgaacatctcgcacgacctgcgcacgccgctcaccgccgtctgcggctacctcgagcttttggagcgggaggaaaaatccgccgcggccgcgcgctacgtcggtttgatacagaaccgcgccgcggcgctcacggggatgaccgaggagctgttccgctactcgctcctgctcgccgacgatgtgctcgagccgcagccggtcgtcttaaaccgcgtgcttgaggaaagcctcctcgcgcagtacggcgcgtttcgggcgcgcgggctggagccggccgtgcggctgccgcaggcgccggtttgccgccggctcgaccccggcgcgctcggccgcattttcgacaacatcctctcaaacgcgctcaaatacgccgagggggatctcgcggtgacgcttctgccggacggcacggccgaatttacgaacacggcgcgcggcctgacgcagaccgaggtgggccgcctgttcgaccggttctacacggtggaatcgggccgcagcgcgacggggctcggcctctcgatcgcccggcttctggccgagcgcatgggcggcgagatcggcgcggaatacggcggagaaaggctgaccgtgcgcgtccgcttcccggaaacaggggcataaataaaggaataaaaaaggcgctgcgtttctcccattgcggatgaaacgcagcgccttgcgcttttatttttcctccggtgcatccgggctttccggcgctttcggctgcttccagttgcgccacgcgccgatgacgtagatgctcgggatcaggagcacgaggatgcaggtgcagatttcagcgacattcacgatcagagaggaaagcgcgaggtcgagcacgtcgccggcagtaatcacaaaaatcgcgatgccgaggacgaagcacagccccatgctgttcggccggtcggcccgcagcatgccgagccagcctgccgcgacgaagagcagcggcaccaaaacggcgaaggtgacggataaaaacggatacggcgacgcgagccggtctgcaaggccgaattcctcggcggcctccgcgctcgtgaacgagagcacgacggagagcaaagacgccgcgccgtataaaatgaacagcacgctgctgatttttacaagaatatgtcctctggttttcatagcttggccacggcctttccgaatcggcaaagcgctttgaggcgcgcccgggtccgttatttttcaatctgtcttgattgtacccgctggctgaaaaaaatgcaaccgtttttttgtgaaaaagacttgcaaagcccgtggaagtgtgctataaaagatgtacggacaacttaccgcatcttttggaaagaagttaaagaaaggccggggccgaaatatctgccccgggacaaatggtggtcaacatgaaaagcaatcgaatttccctcaaggcattccgcgcggacgacagctttgccggccgcgtgcagaagctcgtgcgcgaggaggttctgccctatcagtacaagattttgaacgacgagatgccggacgtggagaagagccacgccatcgagaacatccgcctcgcggcgaagaagctcaagggcggcgatgtgaagcccgaggaattttacggcatggtgtttcaggacagcgacgtcgcgaagtggatcgaggcggcggcgtacgccctcgcggccggcgagaaccccgagctcgaaaaggccgtggacgatgtgatcgcgctgtacggcgaatcccagcatgaggacggctatgtcaactcgtatttcacggtcaaggcgccggacaagatgtggacgaatatgcgcgaggcgcacgagctctactgcgccggccacatgatggaggccgccgccgcgtactataatgtgaccggcaagcgcagcctgctcgacatcatggcgaaaaatgcggactgcatctacgagcagtttatgaagaagaacacgcgcgcatgccccggccaccccgaggtggagctcgcgctgatgcgcctgtggcgcgccacgggcgacgagaagtataaggcgctcgccaagcactttgtcgacgtgcgcggcgaggccccgaactacttcatggaggaggaaaagggccgcggctggaacgtctggaccggcacggtcgagctcaacaccgattacacgcagagcacgctgccggtgcgcgagcagaaggacgccgtcggccacgccgtccgcgccgtgtacctctacaccggcatggcggacgtcgcgaaagagacgggagatgaggcgctgcttgcggcctgccgccgtctttgggacagcatcacgcagcgccgcatgtacgtcacgggcggcatcggctccacctttatgggcgaggcgttcacggtcgactacgacctgccgaacgacacggtgtacgccgagacctgcgcctcgattggcctgatgttcttcgcgaagcagatgctcgagaacgaacaccgcggcgtgtacggcgacgtgatggagcgcgcgttccacaacacggtgctcgccggcatgcagctcgacggcaaacgctttttctacgtcaacccgctcgagtcggttccgggcgtttccggcgtcgcggtcacgcacaggcaggacctgcccgtgcgcccgcagtggtacgcctgtgcctgctgcccgccgaatgtcgcgcgagtcgtctcctcactcggcgaatacgcctacagcgagaacgacgaagcgttctttatcgatctgttcgtcggcggcacggccgagacgcagaagggcatcgccctcacctgcaagaccgatttcccgcatggaggcacggcggtgtacacggtttccggcgcggcggagacgacgctcgcggtccgcatcccggcgtggagcgagcacacaacgctctgcgtcaacggggaggcggttgacctcgccgccgtgaccgaggacggctacgcctatgtgcggcgcgcatggcaggacggcgacacgctcgagctctcgctcgatatgacgccgcacgtcgtctacgcctcgccgaaggttgcggccgataccggcaaggcctgcgtccagcgcggcgcgctcgtctactgcgcagaggaggctgacaacggccccgtgctcccgctctgcatccgcgacggcgccgagccgaaagcgctcgctttcgagccggagacgctcggcggcattgtgccggtcacgatcgcgggctgtgcggtgcaggaaagcggcgcgctgtattccaccaaaaagccggtgcttgtggaaaaggagatccgcctgatcccgtactacacgtgggcgaaccgcggcgagaaccagatgcgcgtctggctgccggtcaaataaaaatcgcataaaagccaaaagccgcctcggtgcatgccggggcggcttttcctgtgcttttcaccgtgcctgcggcacagtaaaaagacgtttttgtgtttttaggacggcgctgttcgttcggttccccgtaacgctcgagcgtttccggcgggtaggcgcgcgtccagtggtacggctgtaattcgcgcagcggcacaaagcgcaggctgccgtcgtcacgccgacgcggacgtcctcgccccagtagcgcagccgcgcctgacagacgccgcacggcgagagcaccgtgaacggggtgttttcgtcgtcccgcacgacacacaggcagtgcgtgacccgctcgttatacttgtgcgcctcgcacatcgcaccggtctcgatgcagagtagcacgccggcgttggcgctttccagcgcgacgctggtgaaaaagctgcccggcgccgtgtgcacgacccggcgccgccccagccggtcggaaagcgcttctggataaacgcgacggcggtctcgtacattttcgcttcgatttctgcgcagcgcgtggcggaatccacggcaaaatctctcctgcgggcggcccggccgtccggcagtgcgggcgcgctccgaatgtaaaagcaaaggggcacgcccgccgcccggagaggacggcgcgcagcgccctgtgtttttgtaaatcagtctataaacggcaggccgtgcccgtcgacgagcttcttgccctgcaaaagctgtacgccctcgacgatgccccagatggccgagacgacggccagccagccgcaggaaacgacagtgatcgcgagctgcgcgacgccgacgccgatgcggccctgatagaagttgtgcacgccgaatgtaccgaacaggatgccgagcagcgcggccgcaatgcggctcttctgcgggtagatcttctgcgccgcgtagggcggctggtagccctgctgcccgtacgggttcgaggcgtagggctgctggtagggcggctgcggctcattgtacggcggctgatactgctgtgtgtagcgcggcggctgatagcctccgttttccgccggatccggctgtgtggggggcgtctgctccggcgcggcctgcgtatactgcgggggctgatacggtgcggcctgctgatacggcgccgcctgctgcgtgtactgcggcggctggtagtaggactgctggtatgccgggtgctggggtgcaggcggcggtgtgaacggggcctgctgcgctgcgccgtaggcaggcggcaccggcatctccggtgcgggcggaacctcagcatcctgcacggcagccgccacagcctcggctctgtccgccacctcggcggggtcgagcgtcagttccggtacgggcttttcgggcgcggcttccggcgcatagctgccggtttccggtgcgggcgcgggttctgcggcgggcgagccgccggcgatttccccgtctgccgcgggctgtaccgcctcgggcgcgggatccggctgggccgccggggtgttgttccggttgttatcgttaaaatccgtcatggttccggttctcctttcggtgtgctcagtctttcagtttgatgccgttgccgtcggcgttgattctgtgctcgaggatatgcacgccctcgacgacgccccagaccatcatggcgaccgtgctgatgccgcaggtgagcgcggcgcccagcgttgcgacgaggatctggatcagaccgcgctggctgttgccgagatagaagttgtgcagcccgatcgtgccggccagaatgccgagaatgccggcggcaaggcggcttttctgcgggtagccctcgggcggctccatgccctcaaagggtacggccgtgtaaacgggcggctgcggggggaccggcgcgccgccggacgggcttgtgtaggggttataattattgtcctgcatatcgttacctcttttcgtgatcgtagcgcttgctttcttgttatttattgtatcggaagccccggcactttgcaagcggtttggagcggatgtaagaatgtcttaaattttgttaaggcggcggataggcttctaaagaattttgccggttttcccgctttatcttgaaaaaacagacggtctgctgtatactgaacagtatcatgtggatgtgccgcaccaatggcacacgagaaaaggggaagagtgatgaaagtcttgatttcagccgacagtacctgcgatctttccgcggcgctgcgcgaaaaattcaacatcggcatcgtgccgctttacattgaacgggaagggaaaaattaccgcgacggcgtggacatcacgccgcaggatattttcgattacgtcggcgcggggcacggcgtgtgccgcacggccgccgtcaatacgggagactacctcgagcgtttttccgcttggcggaaggaatacgacgcggtgatccacttcaacatcagcagcgagatgtcgagctgctaccagaacgcctgtgccgcggcggccgagtgtgaaaatgtgcacgtggtcgattcgcggaacctatccaccggcagcgggcttctggtgctggaggccgccgagcgcgccgccgcgggcgaggacccggcggcgatcgcgcagcggatgcgcgagacggcggaaaaggtggaggcgagcttcgtcatcgacacgctgttttacctgcagaagggcgggcgctgctcgtcgatcgtcgcgctcggggcgaaccttttaaagctcaagccgtgtatcgaggtcaaaaacggcagcatgggcgtcggcaaaaagtaccgcggcaaaattgaaagctgcatcgcgcagtacgtgcgcgagcgcctcagcgggcgcgatgacctgcggcgagaccgcatcttcatcacgcattccggctgcgcgccggcggttgtcgaaaacgtgcgcggcatcatcgccgaatgcggcggctttgacgaggtgctggagacgacggcaggctgcacgatttcgaaccactgcgggccgaacacgctcggcgtgctgttcgtccgcaaatgacgcccgggccgcgcgcgtgccggccggcggaaggaatgatggatctgtatggaaatatatcgtaaattcgcgggggccatgcggcccgcgcgtgaatacgtcgcggcctttttccagtggtcgctgctcggcgcagttgtagggcttgccggcggcgcggtcggcgcggctttctcgaaggctgtggaatgcgcgaccgcgctgcggggcgaaaacggctggctattgtatctgctgccgctcggcggccttttgatcgtcgggctttaccggctctgccgcgtctccggcatcggcacaaacgaggtctttgagagcgtgcgcgccgaaaagggcgtttcgattctgctcgcgcctgcgatcttcctcggcacggtcgtcacgcatctgctcggcggctcggccgggcgcgagggcgcggccttacagctcggcggcagcatggcgacgcttttcgggcggctgttccgcctcagcgaacgggaccggcatattctgacgatgtgcggcatgggcgcggttttcgcggcggtgttcggcacgccgatggcggcctgcgtctttgcggtggaggtcgtgagcgtcgggcggttctgcacggcggcgctgctgccgtgcgtcgtctcctcggcctcggcgttcggcgtcgcgcaggcgctcggcatcaagccggagcgtttttcggtgggagcggttccggcgttttcgctggaggccgtgtggaaaatgctcgtggtcgcggcggcgggcgcgctcgtcagcatcctgttctgctgggcgatgcacacgggcgcacatctctttcagcgtttcatccgaaacgagtggctgcgcgccgcggcgggcggcgtgctcgtgatagcgctctcgctgctctgcggcacggcggattacaacggcggcggcatcgccgtgattgagcgcgtgtttgaatcgggcgcggtgcggcccgaggcgttccttttgaagatcctgttcacggcggtcacgatcggcgccggattcaagggcggcgagatcgtgccgacgctgttcatcggcgcgacgatgggcggcgcgctggcgcttgtgctcggcatgagccctgcgttcggcgcggcggtgggcattgcggcgctgttctgcggtgtgacgaactgcccgctcgccacggtactgctgagcatcgagctgttcggcggcgagggcgcgctgttttacatgatcgccgcgttcgtcagctttctgctttcgggttatttcagcctgtattcgggccagcgcatcgtgttttcaaagctgcgcgaggaagaagtcaacgtgcagggtcattgagcataaaagagccgcatgcggttcagtccataaaaaaggcggcgcctccggcggaaaaccggatggcgctgcccttttttgtctgccggtcggcctgccgtccggtattttttatcggtagtgcggaaatcaggggctcgtcaggatctgcgcgaggtcggaatccgcgccgaggataatcgtcttttcatcgccgttcagcgtttccttgagcgcgtcgagcgcgagcgtgaattcgtagaattcctgcttttcgggcgagttatacgcctcggccagcatgcgcatgtattcggcctcgccctcggcgacgagctttgcggcctccgcctcggcgtttgagacgatgatgttcacctgcttatcgacgtcgttgcggatcagggaggcttcatagttgccgtccgcggtgtatttctccgcgatctgctggcgctcggagatcatgcgcgtgtagaccgcgctctcgttcgcctccggcaggtcgaagcgcttgatcttcacgtcctcgacccggatgccgtagttttcggccagcgcatcgacgcttgtcgtgatgccctcgtagatttcgtttcgctccgcagcgtcgtccatgttgatgatgtccgcctgcgagagcgtgcccatcacgttcttgagcgcattgtaggtcagcgcgttcaggcgctcctcggcgacggtcgtgttgccgagcgactggtaaaatttcagcgggtcggcgatctcccaaagcacgtagcagtccaccgtcatgttctgcttgtcggcggtcagcacctcgctgggcgggatgtcgtagagcatcgtcgccttcgggaaatacttgacgctgtcgatgaacggcagcttaaagtgcagcccggccgcatcggtcgtcgatacgatcttcgaggcgcgcaccgtgcagccgtattcgttttcacgcacggtgaacatcgagccgaacaggcagacggccgcggcaagcacgacggctgaaatcacaatcactttctttttcatgggttaatctcctcgtttattcaccggatgcggcctgattgccgtcctgtacaaagctttcaagcggaagcatcatgtccacgccgccttcgccggcggtgttgatgtacaccttcacgccggggagcgcctcggaaatcgcctcgtaatacatgcgcgagcgcgtgatgtccggattttggctgtattccttgaacatggcttcgaacatcgcgacctgctcggtcgcctcgttgatgcgcttctgcttcaaatattccgcgttgcgcagcagctcgtcggcgctggcctcggcctgcgggagctgggcgttctggtaggcgcgggcctcgttcatgacggtttccgcctgctgcttcgccgtctccacagccttaaaggcctcggtgacctcctcggtcggcgggtcggaatcctgaattttcacgtccacgagcgtcaggccgatgtcgtacgtctgcaaaacctcggcgacaagctccttgacgcgcatctggatcgattccttgccggtcgtcagcacggcgtccacagcctccgagccgaccacgttgcgcacttggctttgcagcaggttgcgcaggatcgtttcggggtcgtacgagccgtagagatactgctcggggttgctcaccttgtattcgacgaagaattccacgttgacgatgttgtaatcgccggtgatcatcttcgtctcactgtcgatgatgtcgaagctgtcggcgtcgccgccggtgctgcggtagccgagctcgagcttctggtagacgttgacgtccaccttttcgacctgctggatgccgagcggcagcttgaagtgcaggccggcgtcggtcacgtcggtgaccttaccgaacgtcgtcacaacggcctgctgcttgtcgtccaccgtgtaccagcaggtggcggcgacggcgaccacgagcgcggcgagaaggccgatgagtagatagcgcggcagctttttcggcaggccgccgcccgaacgaacgggatacaccgcggggccgccctccggcggcgcgccggcgcccttaaaaaaatcaaacataaatcattttctcctttttcaaaaatgaatgcgccttcttgaggccgcattgtacgggcggctcacacgatgcgcggcgatttcggcagcgtgcgcagcatgcgctgggcctcctcctgaagctgtgcggagcgccaggcggtcagcatgatccgcagaacctcgtgcacgcgcgaccgcgcgccgggaaccggctcgttgtagtccggcaggctgcgttcgagcaggggcgtgatctcgttcgcggtcgggaagccgccgcgctccaccgcgcggacgagcacgacgaaggcgttgtagagctctgtgtcgtcgatggtgtcgtcctcctcgtcgtccagcgcgccgttgacatagctcaaaagctggcagatctggtcgatcggcagcgcgctcttcagcgcgttgatgatcaggacgcggctgagctggcggcgcgtgtacttgcgctgcttcggcgcggagagaaagcctcggcgcacccagttctgcacgatgtacggctcaagccctgtgacctgtgtgacttgcgagagcacgaggccccccgtcaggaacatggcggatagtatctcctccgccgcctcgggcttatcggaatcgacgcggagcacggtgccgggaagtgtccaattcaaatttctcgtctccttttaatgtggtgaagaaaatataacatacaatcaaaagattgtcaatagatatttcgagatttttttaaattttcacgaaatttttgtaacgatgagcttcccgctgcttacatacagggtgaaaggaaaaaatacccgccggctgaaacggcgcggcggtgcgaaaggagcttgcacatgaaagggaaaacagcggctttggcgcttgcgtgcgcgctcgccctgcttggcacggcgtgcggcagcgtgcagacgacagaggagacagccgcagcgcacggcagcacggcggcgcatgcgcaggaaaacggcgccggttggagcgccgccggagacacagaggccgaagcggcgggagaggcgctctccgatggggacgccggcgcaccggctgcggaccggcaggtcatccgcaccgcgaacctgtcgctcgaaacgaagcagtacgacgaagcgctcgcgctcgttcgcggtgcggcggctgaatcgggcggctatatcgagcacaccgcgtcgtatgcggacagcggcgcgcgcagcacatcgtttacctgccgcatcccggccgccgcatacgcggaatttctcgaggcggtgcgtgcggcgggcagtgtgcagtatgccgaggaggggacaaaggacgcgacgaacgaatacgtcgatctggaggcgcggctgaaaagcctgcgcacgcaggagacgcggctgctcgcgctgctggaggagtccggcagtctggaggagcttttggcggtgcaggagaagctgacggccgtgcagtacgagatcgagcgctataccggagagatgaaggcgcttgagaacagcatcgagtacgcggccgtgtccgtgtatgtcgaggaggtcgaagcgtacacgccggtggagccggacttcggcgcgcgcattgcggcggccttttcggatatgctgcgcggcgtggcgtccggcgcgcagggcgttataatcgcgctggtttacgcgctgccgctctttgccgccggcggcgctgtcacagttgtcgttctgctttgcgtccggcgcaaaaggcgcagaaggcggccgcccgtgacgccgcaggaaaatatgaaatagggcttgacatgacaattattgttatgatataatccacaacataacaatttgtgttatggaggggcaccatgaaagaatcgatgaaaaacggccggcgagtcatcagcctcgtcaccgaaaaggagctgcgcacgtacatgcacccgctgcggcagaaaatccgccgccttttggagctgcaccccgaggggctgaccgcaaagcaggtggcagacagcctctcgatcgcgccttcgagcgcggggcaccacctcgcggcgctcgagagcatcgggcttgtcgggctggaccgcaccgagcagatccacggcttcaccgcgaaattttacaaggccgcgccggtcgatgtgacgctcggcgaagcgagccccgaggcgtacggcctgcgcgacgtgatgatccgcagcctcgtggaacaggcgcttgaagattggctggccgccgcggcacagcgcgaggcgcgcggggaagcgccggacgccgcgcgcggcgatgtgctcgacggcgtcgtccacctcacgccggcagaggccgcggtcctgcacgagagaattttggcttttatcgccgcacacggcacgccaaggcccggcacgatcccgtacacgtatgcgcttatcgccaatgcggcggaggaaaaattgtgaaacgggatctgcgcgccggtcttgccgtgacggcggttgacgcggcggcgcgcggcgtgctctcgccggttctgagcctcgttttgctcggcagagatgtgagcctcgcgcagcttccgctcgcgttggcggtcttttccggcgtggcggttgcgctcgaggtgccgagcggcatgcttgccgaccgcatcggccgcaagcggacgttcgtcgcggcgcaggccgtttatgcactcgccatgctgctcctgcttttcgggcgcggcatggcgatggcttgcgccgcccttgcggtgaacggtgtggcccgggcgctggcgagcggcagtctcgacgcgcttgtggtcgatgcctgcctgctcgagcagggcgaggcggggctggccggcatcacggcgcggcagggcgcgtgcaaatcggcggggcttgcggtgggcgcgctgctcggcggcgtgctgaacggcttcggcggcatcgaggccgcactgctctgcgccgtcgccctgacagtgctggcgctgctcggcgcggcggcctgcacccgtgagaccggcggcaggccggcggagcgcccgagcctgcgcagccagcttcgggcggtagcggaggcgtgccgcgaaagccggcggctgccggtgctgctcgcctcgaccgcactgtgcggcgtgctgatgatgctggtcgagacgtactggcagccgcggttcacggcgcttctgccggcggattctctgctctggctgctcggcctgctcggcttcggctactttgccgcctcgattttcggcagcctcgccgcggagcgggcggtgaagcggctcggtgcgaaccgcatctttctgctcggctacgcgctttcggcggtctgtctgctggcgctcagtgcggtgcgcacgccggccggattcagcgcgctgtatctgatgctttaccttctcatgggcgcggccgatacagcgcagggcatcgcgattcaccgcgccacgccgtccgccgtgcgcgccacagtgctgagcgggcaggggctgacgctccagctcggcgcgctttcggcgagcggcgccgccgggctcaccgcaggccggctttcgatccccgcgctctggcagctcggcgccgttctcttcctgctcggcatcgctgctgttgccttactgctcaaaaaggccgcccggtgaggcggccttttcgcgttcgtcttatgggcggagcagcgcctcaagcgtcgcggtgacgacacggagctgcttttcgtcgcactgccgcagcaacgcctccgcatgggcgcgctccgggttgttttcagccggcggggccgctttgcaggcggccccgtcccttttctcttgacaacccactttccggcacgtatactggaaacagaatttgtggattcgagggaggacgccgccatggtacaatgcagccggtgtgggacaatttacgaggagagcgcggcgtactgcccgcactgcggggcgaacgcgccggtttacagccagccgcaggaatacggccagccgcccgcgccgccgcatgggcagggctaccccgggcagcaggggcagaatatgccgccccagccgccggtttacgcgccgccgcccgtgaatccgtacagccggccgccgcagaacccgtattacatgccgccgcccatcgtgccgccgccgtataacggcatggccgtcggcgggttcgtgctctcgtgcgtttcgctcgtgctgtgctgcttcccggtcaccgcgctcgtggggctggtgctgtcgatcatcagcctgccgcagatcgaccggcgcggcgagcgcggcaagggcctcgcggtcgcgggcatcatcctgaatgccctcgtgctgctgttctggcttttgatgttctttttggcgatggcagacggcctgtattgaccgagagatcaaaacggagggtgagcgatgtatatttgcaggggctgcgggaatttcatggaggaaaacgagcgggtctgcccgtcctgcggcacgccgcggggcgaggagccgaaaccggagccgtcgcccgaaacggagccgctgcatggaacggttccgcgccaggcggacggcgcgccgaccggtgaagcgccggcaggaggagcctccgccccgcaggcgccgcccgtgtacggcccgtatgcgcgcccggtgccgcaggccaagacgaacggcctcgccatagccgggctgatctgttcggggcttgggctgcacacctgcggcctcacagcagttgcgggcctgatcctttcgctcatcgcgctgcggcagatcagcgagcgcggcgaaaggggcaagggcgtcgccgtcgccggggccgtaatcggcgcggtgatcctcgtgtttttcgccgcaagcctaatgtcgctgtcgtttttcgcgcatgcgggctgaaggcggagagcgcagtatgtctgtgcggtgggtgccgatggcgcaaaaaacaaaaaaagaccgttccatccggaacggtcttttaagcatgcgatttttggaagttacgcgcccgcgttgagtttcttatcgagagcggacttctttctggcagccgtattcttgtgcagaatacccttcgcagccgcctgatcgatcttcttgacagcgaccttgacagcctccgccttgtcagccgcattggactcgatcgccgcgttggccttcttgagctcggtcttgagatgagagttgatcatcttgttctgcagggtctttgcagcagcaacctttacgcgcttcttagccgatttaatgttaggcacagtagacacctcctcgataacaggattatagtacggcgaaaccgcctgaaccgtattggtgggcatagatccgccttaaactccaataacgcagaaataatgataccacattgcccccgaaaatgcaagcgttttttccggatttttcgcaaaatgcgcgcgcttggcctgaaaatcgaaaaaaccacaagatacggtagcgcaccgcgcctttttgggtggatttttccgccgccgggccttataatggaagcaaaagggaggcgtatcgcatgattcgggaagcaaaagcggaggactgcgcggcggtgcatgcactcgccgaggcgctggagggctgcacgctcgacggcgcggcgttccgcgagatctatctgcgccagcgcagctcgcctgcatggcgctgtctcgtttttgaaacggcgggcgaaacggtcgggttcatcaacatgcggatcgaggcgcagctccaccacgccgggcgcgtggcggagatcgtggagttcgccgtgcgggacgacctctgcggcggcgggatcggccgcaggcttttcgaggccgcctgcgcggcggctcgggccgcgggctgcgggcacatcgaagtggcctgcaaccgcgcgcggcaggcggcacaccgcttttacgggcattgcggcatggaaaacacgcattttcgcttcacgctgccgcttgcgctgtagcggggaaagccgtcgcgcgatcaaaatacattttgggaggcgttcgtgtgaaaaatacgttttcacacacggtttgtgcctttaccgcggcgagcaaagcggcaatcggcttcgccggccggcacaaaaataaggaaaggtgatttttatgtccaaattcttcacggcaaacaggattttcgagaatgtcacgcagatcggcggcctcggcggcgagctgtgctacctcgtcgagggcggcgaacgggcgcttctgatcgacggcctttcgggcgtcggcagcctgaaagcgttcgtgcgcgagctgaccgacctgccggtggagcttgcgctcacgcacggccatgtcgatcacgcgggcgcggcatttgagtacggcgtgtgccgcgtccacccggccgacgtcgagatgctctacgagcacggcgacccggcgcgccgctacgattttgcgacgcgcggccggcccgcgggcgcgtttatgccggtgccggaggacgtcgtgccgcgctgcgcggtgcgcacgctgcccgtgggcgacggcgatgtgttcgacctcggcggcgtgcagattgaagcgatcgcggtgccgggccacacagggggtacgctcgtgtttctcgaccgcgcgcaccgcgccgtctattccggcgacgcctgcaacccaaacacgctgctcgcgctgcccggctccacgacgatcgagacatacaggcagagcctgctgcactttgcggcgttttcggatgcgttcgacgtgctctacggcgggcacgggaccggcgcggtggaaaagcgcatcatcggggaggcggccgagctgtgcgatgagatcatggccggcacggacgatgcgtacccgatggcgtacatcggccgcgaattcctctacgcacgccgcttcaccggcgatttcaagtgccgcgacggcagactcgccaacatcgcctacagaaaagaaaccattttcaacaaataggaggaaatccaatatgaaagttcttttaatcaacggcagcccgcgcagaaacggctgcaccttcacggcgctctccgaggtggaaaagacgctgcaccgcgaggggatcgagacggagctcgtgcagctcggcgcaaaggccgtgcagggctgcatcgcctgcgggcgctgtaaaacgcttggccgctgcgtgttcgacgacctcgtcaacgagacggcgccgaagctcgaggcggcggacggcctcgtcgtcggttctccggtctattacgcctcggcaaacggcagtctcatcgcgtttttggaccgcctgttctacagcacgccgttcgacaagacgatgaaggcgggcgcggcggtcttgagctgccggcgcggcggcgcaagcgcgagcttcgacgagctgaacaagtatttcacgatcagcggtatgccggtggtttccagccagtattggaacagcgtgcacggcaacacgcccgaggaagtcgggcaggacctcgagggcctgcagatcatgcgcacgctcgggcggaacatggcttttcttgtgaaaagcatcgcgctcggccgggagaagctcggcctgcccgaaaaggagccgcgcgtctccacgaattttatccgctgaggcctacagcctgcgcagaaaggcggtttttgcatgccggtcgaagccgcagcgctcgtaaaaccgcagcgtgctctcctgtttggagccggtcagcagcatgaccttgtagcagccgttttccgcggcgatttcgcaggcgcggcgcagtgctttccgcggtgcgcccggtgcgtcacgacgttttcgatcagggcgtagggccgcatgccgtgcgtcaggttttccacaatcacgagcgttacggtggaaatcacggcgccgtccgcctcgcccaccagcaggtggtagcgggggtcgccggcaaagcgggcgagcttttcgcgccacaggcggaggtcctgcggcgggccgggcggcgtctcggtgaggtggtgcaggtacagttctgagagcgcctcggcgtctgcgggtacggcctttcggatggataagtgcacgggtcatcgctcctttttgcttatgtgctcagtatagcacgcggaaagcggcaaaacaagtgcccgggcggatctgcgccgcattcgataagtatttgacgaatgcggggaaaaccacttgatttatgtacggaaatcctctataataattaaaaacgtgcgcggaaaacccgtgcagatcgaaacgcttgaaaggtaagggtgaatcagagtatgaataaaatcaccatcatcggaagcggcagcgtcggcgccaccatcggctatacgctcaccgtcatgggcatggcttccgagatcgtcatgatcgacatcaacaacaacaaggcgctcggcgaagcgctcgacatccgtcagggcacgccgttctgcagcccgtgctccatctatgcgggcagctatgcggacagcaaggattccgatatcgtcatcattacctccggcgtggcgagaaagccgggccagtcgagactcgacctcgcgcagacgaacgtcaacatcatcaagagcatcatcccggagatcacgcgctacgcgcccgacgccgtttacctgatcgtcagcaacccggtcgatattctgacctacaccttctgcaagtgctccggcctgccggagtcgcgcatcatcggctccggtacgatcctcgataccgcccgcctgcgcgcgcgcctcgcggagtattactcgatcaaccagctcaacgtgcacgcatacgtgctcggcgagcacggcgacagctcgttcgtgccgtggtcgctcgcgaatatttcgaacatcccggtgaaggattaccacagctccatcgccgcgtccgatctcatcatgcccgcgctcgattacgcggaggttgaaaagtacgtccgcaagtccggcggccgcgttatcgagcgcaagggcgctacgttctatgcggtttccgtctcggtctgccacatcgtcaaatgtatcctgaccggcatcgacaccacgatgaccgtctccacgatgctcaacggcgagtatggcatcgacgacgtgtgcctcagccttgtgaacatcgtcggccacaagggcgcggagagcaagatcctcctgccgctcaccgacgcggagcaggagtcgctcagaaagagcgccgagtgcctcaaggagatcatccgtcaggtcgagatctgatttttcggcggcataccgatgtacatacggcgccggccggcatttatctgaaaagcaaaggaaaagggcacaggcggtattccgtctgtgccctttgtgctgcgcgcaggtgcgcgtcagagcgtttcgatcttctcgtcgtacacggcctccacgccgattttgcccttatccatctggtggcgcgccttgcggttttccacggtgtcgaagaggatcgaaaaatcgtagtccgcgggatacagatcggcggccttggcctgcattttgagccggctgtgccggacgctgtattttcgcccctgcacctgcacgacgacgctgcccatctcgtcggccggtctgtagacgatgccgagctttctgcccgggtagacgaccacggaatcgccggtttcaaactgcagggcgtgctgcgggggcttttttgcgcgcggggtattttcgatgcggcttttcggcgcgggctgcgccggcagcggcggcggaagctcgagcgctgcgccgtgtccgccgtctgcccggccgtaggtcacggatttcgcgtagccgagcagcgcctcgggaaagccgagccgctgggcgatgtaaaacgcgcagctttcgccggcctcaccgatgacgaggcggtactccgggcgcagcgtttcgcggttgaaggtcatgcgcgcgttgagaacgcccggcgactgcgcggcatactgttttacctccgcgtagtgcgtcgtcgcgagaaacaggcagccgcgctgccgcagggcctcgagaatcgagacggcgatgcccatgccctcggccgggtccgtgccggagccgagttcgtcgagcagcacgagcgtgtcgggcgccgcatggttcaggatctcgatgacgtttgtgatgtgcgcggaaaaggtggaaaggttctgcgcgatgtcctgccggtcgccgatgtcgcagagaacggcgccgttcatgcagatttccgcgccgtcgcacggcaggtgcaggccgcactgcgccatgacggagaaaagcccgacgagcttcagcgtcacggtcttgccgccggtgttcggcccggtgatcacaacgccgcgcacggtatccgcgccgtgcggccggccgatttcgaaatcgaccggcacgcagtcccggctgtcgagcagcgggtggcggcccttgtcgatccgcatgtgccgctccgtcgtgatctgcggcgcgcgcccgccgtgctccaagctgagccggccctttgcgaaagcaaaatccgcggattcgatggtttccgcgttcagccgaatcgcggagccctgctcggcgaccatgccggaaagcgtgtagaggattttgtcgatctcaatgacctcctcggtttcgagcagcgcgagcttttccgtaaagcggcggatggcgctcggctcgataaagcaggtagagcccgccgaagaaaccgtgacgacgcttccggcaacctgattcttatagttcttggagaccggcagcgtgtaccggccgtccttgacggagatgaagctgtccgtgcagtattttttgtggctgcgcagcagctcctccattttcgttttgatctgtccgcgcaggctttccatctggcggcggatatttcgcagggcgggcgtggcgttggaatcgatctccgtgccggtgatgcagcggtgaatctccagcgtcagcgcctccagcgagtcgatcacgccgccgcagaaggcgagccccgcgccggtcgtttcggcctttttcaggtaggctttcaggcgcttgcaggccgcgccgaaggcggcgcaggagagcagggcctccggcgtgagcaggcctcccttttcggcgcgcgtcagcgcgtcccttgccgcctgcgtgtccggcagcggcggcaggccggcaaagtcgaggatggtccgcgcgtcgtttgtctcgcgaagcgcgccggtcagccgcgcttcgctgcggtgcggcgcgagcgccgcgatcttgtcctgcgcccattttgtggcggcgcagccggcaagctgggcgcggatctgttcaaagcctagggtttcgagtgcgttttgcatgggtgcgttcctttctgaaataaaaaatccgcaggtactctgccggcgcaaaatacctgcggatacgcaaaaagaacgcggaaaccccgcgaaaacggacgtatcaggcggcaaggcgcggacagagtacgggtaaacggctgcaaagtgagccgggcgtgccgctttttgcggtacgccttatccgatcgctgttcaggccggcctaagtcagagactcagaccgacgcacccgccgataacatcataaatccgtcttcctttcatcacactgattttgggtcaaggatagcacgaagccgggcgtttgtcaagggaaaaagcgcgcaaggcttgtttcctggcgcggtttgtagtaaaatcataggcagcggcggacgattccgccgcggaaagggatgtgaacaaaacagcatggagcggaaatataaaaaggtctccttcgaggaggccggggaaatcatagaaaacgagccgaaccggctgatcttcgacgtacgcgaggaggaggaatacaacctcgggcacgcgaaaggcgcggctttgtttcccgtgggcagcatcacgcgcgaaacggcggagaagcggattccgtcggccgatacgccggtgctagtctactgccgcagcggccagcgcagccggatggcggcggaaaagctcgccgcgctcggctacacctgcgtttacgatgtgggcagccttgtcggctggccgcacggcatcgagtggtaagccgcggcatgtgcggtgaggatgcgggcgccggggatcagaagcagcgcgcctgccgcgttttccggcagtcctgcccggctttgtcgcggtcgcagaggtagcagatctcgttttcaagcggtgcgccggagaaaaacgcgtcgagatttttgatcgtcttctccgcgatgttgtggagcgcctcctcagtcagaaacgcctgatgcgccgtcaaaatcacgtttgggcgcgagacgagcagcgcgagcgtgtcgtcgcggatgatcgtgtcggagcggtcctcgtaaaagaggttcgcctcctcctcgtacacgtcgagccccgcgccgccgaccgtgcggtcgttgagcgcgtcgagcaaagcctcgctgtcgatcagcgcgccgcgcgaggtgttcaaaatgaaaacaccctttttcatcttggaaaaggcgccgcgattcaaaatgtgctgcgtttcgggcgtcagcgggcagtgcagcgagatcacatcgctctcgcggaaaagcgtgtcgagctccacatagtcgaggtcgctgtcctttgcagggaatttgtcgtaggcgagcacgcgcatgccgaagccgcggcagatttcgatgaacgtgcggccgatcttgcccgtgccgatcacgccgacagtcttgccgtagaggtcggtgcccgtcaggccgacaatgctgaaattgaactcgcgcgtgcggttgtacgccttgtgcagccggcggttcagtgtgagcagcagccccatcgtatgctcggcgaccgcgtgcggcgagtaggccggcacgcgcacgatgtgcagcttttcaaaagcggcctgcacgtccacattgctgtatccggcgcagcgcatggcgatgagctgcacgccgttgttgtggagccgctcgatggcgagcgcgttgatgcggtcgttcacgaaggcgcacacggcgtcgaagccgtcggtgaatttggcggtgtggtggttgagcttctcctcgaagtacgtgatctcgtaattttggccgagcgcgtcgaaccaagtgcggtcgtacggcttcgtatcgaaaaatgcgatttttttcatggcggcgaacctcccgttttgttttctgtctgtagtctgtgccggataaaccgcgctattccgcacaaactacgggagaagcgccgaaatgcgcggccgtgccctgtaaagagcgcggcgcctgcgatttcgtgcggagcaaaggaggcatccggattttggaatatattcgtgcttttgtggtcggcgggctgatctgtgtgatcggccagcttctgatcgatttgacaaagctgacgccggcccgcatcatggtgctgtacgtgacgggcggcgtggtgctcggcgcacttggctggtatgcgccgctcgtccattacgcaggctgcggcgccacggtgccgctttcgggcttcggctacctgcttgcggagggcgtgcgcgccgccgtggaagaaaagggcctgctcggcgcctttaccggtggcgtggcggccgcggctgcgggcattgccgccgcggttgccttcggctatctcgcggcgctgttcgcaaaaccgggggataaggcctagcggcgcaaaacgaaaaacagcagaaaacggacggctgccatcgaatcgggcggccgtccgttttgctgtgcgctttttcccttgacaaatggttttttcgcggctataatcaaaatggttcttttaaaaacagtttctaataaaactaaggggagcggatagatggaacgaatcacggaatacctcagccacatccggcgcacgatgaagctgcatgaaagtctcctgaaaacgatctgcgggcggtatggcctcacacttgtagaggcgcaggtcgtgagctttctgcacaacaacccgacaaaggacacggccggcgacattgtggagctgcgcatgctctcaaagggcaatgtctcgcaggcggttgaaaggctgattcagaaatcgatgctggcgcgcagcccggatgcggcggaccggcggaaaatccacctgcgccttttggcggcgtcggcgccggtcacgaaagagatcgacgcactgcaggagcagtttcatgccgcggtgtttcaggggctcagcccggaggagtacgcgctgtttgaggcgctcaatcgccgcgtgataaaaaacgtcgagcgcgccgcacagaaaaaaacgccggaaaatgacggtgaatagggggatacaacatggagaaggataaggattttttggctaaggagcctgtgggaaagctcctgctgcgccttgcgctgccgacggtgctcgcgcagcttatcaacatgctgtacaatattgtcgaccgcatgtatatcgggcatattccggaagagggcgccatggcgctgaccggcgtcggcgtctgtatgccgctgattatgatcgtcgcggccttcgcggcgctggtcggcaacggcggcgcgccgcgcgcttccatttttatgggacagagcgattatgaaagcgcggaaaagacgctcggaaactgctttacgctgcagattatcatctccgttgtacttacggctgtcctgctgatctttaaccgcacgtttcttctggcgtttggcgcgagcgaaaagacgatcggctatgccgtggattacatgaatatttacgcgatcggcacgatttttgtacagctcacgctcggcatgaatgcgtttatcacagcgcagggctttgcaaaaaccggcatgctctccgtcttgatcggcgcggcggcgaatatcgtgcttgatccgctctttatttttgcgtttgatatgggcgtgcgcggcgcggcgctcgcgacgatcctttcgcaagccatgtcgtgcgcatgggtgcttctgttcttgttcggcaaaaagacgcagcttcgcctgcgccgcagtcggctggggctcgagccgaaaatcattctgccaagccttgcgctcggcctgtccgtctttatcatgcaggcgagcgaaagcgtcatttccgtctgcttcaatgcctcgctgctgcactacggcagcgacatcgccgtcggcgcgatgacgatcctcacgagcgtcatgcagtttgcgatgctgccgctgcagggcctcgggcagggcgcgcagccgatcatcagctataattacggggcgggcaacgcacagcgcgtcaagaaggcgttcagcctgcttttgaaggtcagcctcgcttatgcggcgctgctttgggcggccgtcatgcttttcccgcaggcgttcgccgcgatgttcacttcagatgcggcgctgctcgaattcacgcgcacggctttgcgcatctatatggcgtgttcggtgctcttcggcatccagatggcatgccagatgacgtttaccgcgctcggcaaagcgaaggcctccatccttgtcgccgtaatgcgcaagttcattctgctgattccgctgatctacacgctgccgcatctccttgcgtctgacccgacgacggccgtttatctcgcagagcctgtggcggatttcttcgccgtgtgctttacggccgtgctctttttcttccagttccgcaaggcgctgcgggagatggcggctcagagagtcggctgaggtattcgcccgcgctgttgtccaaaacagaaaaagcccccgcacgaaaatgaacggttccggattgtgcagatagttcaatccgaaatggttcaaaatgtgcgggggctttgcagacctcttactggatcgagccctcgagatattcctccagctcctcgtcctgtctcttcttgtcgaaatacgaaaataccgcgaacgccgcggcgataacggcgacggccgccgtgatgcagccgatgatcgtgagcactttattgaggcatttcataaataaatccgtcctttctgcgtgtcgtttcacttccagcaatgcgccgccgtgcagcgcatcaagttatctctatcatacccaagtttttgtaaaatgtcaaatctttttcaaacatcgccgcggttttcttgacagtccgtcaaaaagcatatatcatatatttctgaggcgtcggccggtgagccgcgcgccggaatgcgggggtataaggatcaggatgggaacaaaagctttatcgacggccacaatccgggatgtggcgcagaaggcgggcgtgtcgcagtccacggtgtcgcgcgtgctgaataaaaccggctacgtcagcgccgccacgcgggcgcgtgtcctgcgggcggtcgaatcgctcgattattcgccgagcgccatcgcggtggggctttcaaaatcccgctcgcggatcatcggcgtgatcgtgccgcagatcttctccccctttttcagcgagcttttctacacggcggataagatcgcagagcagtacgattaccggctgctgctgtgcaattcggatgcaagcgccgagcgcgaacgccgcctgatcgacgacctgctctcgtataagatcgccgcgctgtttatcacgccggtcgaggggccggagggcggaaacaccgcgtatctcaacagcatccgccgcagcggcatcccggtcgtctgcgtggaccgcgagccggagggcatcgcgtgcgacggcgtgtatatcgataatttcggcgcctgctacgaggcgacgcgcgaggtgctcgagcacggctggcgcaatatcgcctatatggcggacccgcccatctacgcgccgggccgccagcgtttgcaggcgtttgaggccgcgtgccgcgaattcggcgcggcggtgccgccggagaaccgcatgctcgcgccgatcgaggccgtgcagacgcgtgaggcgtttttaagggagatcgtgcaccgcgcgcacccgccgaaagcgatcatcaatttctcaaagggctgggacgccgctatgctgcgcacgatcacctcggcggggctgcgcgtgccggaggatattttcctcacgggcctcgacgacgacggcgctttgcaggcctacggctactacacgaattacacgccgggcacgcccacggtggcgaccgccgcggcaaaccttttgatggagcgcacgctatgtaccggcccgctgcccgcgccggtgcgcaacgcgatccgcacgcacctgaaaacctttttgaagccgggcgccgctctgcccgcgccggatgtgccgccggcaggcccgaatacaacgaaacaggggtaacgaacagacgatgaaatttatcaaaccgaatttttatgaccggttccgctgcacggcctccgcatgcagcgacacgtgctgcgcgggctgggagatcgacatagaccccgatacgaaggcgtactacgaggagctggagggcgacttcggtgagcggctgcgcgagcagatcgaggaactgcccgacggggcggcatgcttccgcctgacggacgacgagcgctgcccgtttctcacggacgacaacctctgcgaggtgatccacgtgctcggcgacgacggcctgtgcgagatctgccgcgagcacccgcggttttacgagcagctcggcgaccgcatggagatgggcgttggcctgtgctgcgaggaggcgtgccgccttctgttcgagcagcgggagccgatcacgttcatcacgacgacggtgggcgaaatgccggacgccgcggccgtgccggacagcggcatgcagatcttccgcctgcgggacgaggccttccgcctcgtgcaggaccgctcgctgccgctgcgcgtgcgcatgcaccggctgatcgatttcggcgcccgcgtgcatcgggagcttctcagaaagcctgcggcatccgacgctgcgccttcggacgatgccgatacgcgcgaggcgcttttgcaggtgatggaggcgctcgagccgtacgacgaagcgtggcccgagactgtccgcctgctcgacgacgcgtcgctcgccgtcaacctcgacgagatcgacggcggctacgagaacctgctcgtctactttttgtaccgccacttcgcccgcggcatgctggagggaaacctctcggcgcgcgtcaaattctgtgccgtaagcgtttggttcatctgcctgatgaacacgaaatgcctgcgcgataccggcgcgtttaccccgtgggaccgcatcacctgcacgaaggattattcgaagcaggtcgagtacagcgcggaaaacatggaagatatgctgcgcgccctgcacagggaccccgcattttcggcggaaaacctcaagcggcttttcggataaaataaaacgggggttcccggcggcctgcccggaatccccgttcgtgcttttcagttatttagaccggaaaatgcgctgcatcaggtagatggaaaggatgatgatggcgatcaccagaaagacaccgagcatgcccttccccatgtattgaaggctgtccacaaaagcttcgaagttcaggttcataatacaggctcctttctcagtgaatgaggttcagaatgatgccgcccgcgataaccgaggcgatctgaccggagacgtttgcaccgaccgcatgcatcagaaggaagttctgcgggtcctctttctggcccattttctgaatgatgcgggccgacatcgggaacgccgagatgcccgctgcgccgatcatcgggttgaccttcttcctgacgaagaggttcaggaccttggcgaacagcacgccgccgaaggtgtcgaatacaaaggcgatgaggccgagcgcgaggatcagcagcgtgtcaacgcgcaggaactcttccgccgtcatgtgcgccgtgatcgaaatgccgagcagcagcgtgatgagattcgccagcacgttctgcgccgtgtcggagaggctgttcagcacgccgcactcacgcagcaggttgccgaacatcaggaagccgatgagggccgccgaacggtaggaaacgatgctgaccacagccgtgatgatgatcgggaacaggatcttggtctgcctcgagaccgtgccgggcttgtactccatgcggatgcagcgctcttttttcgtcgtcatcaggcggatgacgggcggctgcacgatcggcaccagcgccatgtaggagtaggccgcgacggtgatcgcgccgatatagttcgaattcagcgtgttcgcgacgaagatggaggtcgggccgtccgctgcgccgataatcgaaatggaggccgcgtcgtgcagctcaaagccgaagaggcgcgccatgctcagcgtgaagaaaataccgaactgcgctgccgcgccgaacaggaacagtttcgggttcgtcagcagcggctcgaagtcgatcatggcgccgatgccgatgaacagcagcagcgggaacagctcgttgccgatgccggagtcaaacagcaggctgatgacgccgatctcgtcgccgtgcatatactcctgcgtgatgacgccggtgagcgggatgttgacgagaatcgtgccgaagccgatcgggagcagcagagtaggctccatctttttggcgatcgcgaggtaaatcaggataccgccgatacaccacatcacgacatgctgccaggtgatgttgaacacgttggaaaacagaaagtccacaaagtccatggggttcagccctttcaagaaagtttccgggaggccgcggggtcttttttacatgaaaaaagacccctatcatgcccgggtacatgataaaagtctcgcaaattaaaatgcagacgggcgaaaggccgccgtgctgtcgcctgcattacagatggctctgcatgctactcccttttatacccaatagtttacgggaatgtgacggatttgtcaagaaaatatttcggaggtaaagaagaaatggagcttaatgccgttcaggaggaactgctttcaaaccgggatgaaaaataccgggaattttcgctttcgctgacgaaggattccgctctgccgatgctcggcgtgcgcctgccggtgctgcgcgcgatggcggcgcgcatcgcgcgggaggacgcgcgcggcttcctcgaagcgtgcgatttttcgagcatcgagatgacgatgctgtacggctacgtgctcggccgcctgcgcggggagatcggcgaggcgcttttttggctcgcgcatgcgatcccgcatatcgacaactgggcgaactgcgacacgctctgccagtcgttcaagcaggccggaaagcacccggcggagacgtgggaatttctgatgacgctccgcgcgtcagaggagccgttcacgctgcgtgtgctcgccgtcatgctgctgagccactttctcacggacgattatatcgaccgcgtgctcgagatcctcgatgaaacgcgctgtgaagcgtattactacaggatgggcgcggcgtgggcggttgcgaccgctatggcgaagtaccgcgacaagacgctcgcctttttaaagacaactgccctcgacgactggacgtacaacaaggcgattcagaagatgctcgaatcctaccgcgtctcgccggaggacaagatcctgctgcgcgcgatgaagcggaaatgagcacaggccgcttcctttatcggaaagcggcctgtactcattccttttttgttccgcagtatgggcagaagctttgattgcttccgattttttgcccgcattttgcgcagaagctttccgcgcgctgtgcggttttaagcgaatttccgcattttccgcaatacgcaaatcggccgtccacgatgtttttgcaggacggacattttacctgcgtggcatcgaaaacacgcgtggcaggcggagcggtatagaatgtgccgttatacgtctggcgcgtctgcgtggtttgctgctttgcacctgtggcgtagccaatgattaagaataaaacccccagaatcaaaatgataatgaaaatgatccgcgcggtttccgcataggacatattgctggttgtaccataccacgcgctgctgaatcgattgctgtagtctccctccgcctccatatatacaatttgcgaaataatcgttccgatacctccgatagtagtcaatatccacccaaatcctttcataaattaaacacatcctttcatgattattagtgactatcccggctcaaggcagtgcctaaaaagcacaggacggcatatttccgttgacctctgctttatatgtatagtataggtcaatttcaccctaaagtcaataggtcagtttgccataatattgatggggtgaaaaaatgagcagacttaaagatttacggaaagagcggggatatacgcaggttaaaatgcagtttctgacgggtatcgaccagagtgattattcgaagattgaaaacggaaagcgttactatacctttgagcagtgtgtgaaaatagccacagcgctgcatacgagcatggattatctcgcgggtttgacagacgaaaaggagccgtatccgagaaaatgcggaaaaacagaataagaacaaaagaccgaaaatggccgtgtccatggacacggccattttcggtctttgttttttatttgtatttttgctcgagcgcgagcagggcctccttcatcggcagccctgcgccgaagccgacgagcgcgccgccggcgccgatcacgcggtggcagggggtgagaatcaaaatcgggtttttgttgttcgcgccgcccacggcccgcgcggccttcggcttgccgaccgccgcggcgatctcgccatagctgcgcgtctccccgtaggggatttcccgcagcgctgcccagacggcgcgctgaaaatcggtgcccctagggttcagcggcacggaaaaggtcttgcgcgtgcccgcaaaatattccgtcagctctttttttgcctgctcgagcacgggcgcattgccctccgggccggagagcgggcggctcgtgacgcaggaaacggcgccgtccgcctcctcgatccacagcgtgccgacaggcgtttccaaacggcagtgcatggccttacggcaggcggtggcccgcaccgcggtagatctcgtaccagtccgcgcgggaaagctcgatttcggcggccttcgcacattctatgatgcgcttcgggttgatcgagccgacgacggcctgcatcttcgccgggtggcgcaggatccacgcgagggaaatcgtcgtcgaggatacgccgtagcgcgcgccgacctcctcgagcaccttgttgagcgcggcgaatttctcgctgccgaggaaaacgccctccatgaagccgtactggaacggcgaccaggtctgaatcgtgatgtcgtgcaggcggcagtagttgagcacgccgttgtcgcggtcgaggttgcggtcgtcgccgatattcatgttcatcggctgctcgatcatcgaggcgttcgtcacgctgagctggagctggtcggctgcaatcggctggcgcacgtacttctgcagcagcgcgagcgtgttcgggtcctcgttcgagacgccgaagtgccgcaccttgccggcggcctcgagcgcgtcgaacgcctcggcgacctcctcgggctccatcagcgcgtcggggcggtgcaggagcagcacgtcgaggtagtcggtgttcaggcgcttcaaaatgccgtccacggaatttaagatgtgcgccttcgaaaagtcgtacatcttgccgggcacgatgccgcatttcgactggatgatcagcttatcgcgcgagacgccgctctcgcggacgagatcggcaaagacctcctccgagcggccgcccgcgtagatgtccgcgtggtcgaagaaattgaggccgaggtcgagcgcggtgcggaagtattccgccgcctgcttccgttccgcatccgcgaggcgcatgcagccgagcgcgagcacgggcacatccatgccggttctgccgagtttgatcgttttcatagcaatacaatccttccttataaaagcgttctgtgctttcattatagagcaaaagcgcgggggcggcaaggggaaaacggaaagttttcaaaggcacttgctttcccctgccgcgtgcgctacaatggaaaaaaatctcttggaaagaggatgttgaaaaatgcgttttggtgtctgtgcgccggtttccgaggcggcgcggcttcataagctcgggttcgactacatcgaggtgagcgcgtcgtcgctcgcctcgatgacggaggcggaattcgccgcattctgcgccgaaaatcaggcggcgccgatccacgccgaggcggcgaactgcctgttcccgggcgaaattcgcctgaccggcgacgcggtggattcggatgcggtgcaatcgtatatcgaccgcgtgatggcgcggctcggcgcggcgggcatacaaatcgccgtattcggcagcggcggcagccgccgggtgccggagggttttgcaaaggagcgggcgatctcgcagctcggggacgtcgcgtaccggcttggcgaagcggccgcaaagcacggcgtcacggtcgtgctcgagccgctgcgccgcgaggagacgaacatcctcaacacgcagccggaaagcctcgcgttcgtgcaggccgtcgagcacccgaatttcaagctgctctgcgattactaccacctaattgtcgagggcggcacgccggagatggcggcggcctgcggcgacgcgctgcgccacgtgcacatcgcaaacccggacggccgcgtcgcgatgaagccgggcgacaaggccgattacaaggcctttttcgacgcgctgcgccgcgcgggctacgatgcgcgcgtcagctttgagggaaatgcctcggactacgaggccgagctgcctgccgcgctcgaagtcctgaaaaaagcgtgacgcgtcagaatgcggggaaatctgtgaaataaaagaaaagcaccgcctgcggccctgaaaacgggtgcaggcggcgcttttgttcggcggtttatttcgcgaggtaggtgcgcagcgcttcgagctgccgctcggcctcgcggcggccatcctcgtagagggcggtcagcttttcggtgtcgcgttcggtgtgcgagacgtcaacgggcttctgcgggcggatcacaaagatgcgccccgccgcctcgagccggtcgatctcgcgctgctggcggtcgtaccgcgccggaatttcgcacagcgcgcggaagaaattcgggtaatgccgaaaataccgcgcgtaagcgtgcagcacggggcgcggtgtgtacagcttgcggtagcccttctggcgcgtcagcacgagcacgattttctcaaagccgctgtcgatcgcgcgccggtaggggatcgccatcgcgcagccgccgtccagatagcgcttgccgtcgagcaaaacggccttcgagaggatcggcatgctgctgctcgcgcggatcgccgagaaaatatcgctgcacgcgctcttttcaaagtattcggcctcgccggtcccgagattcgttgccacagccgtgaagcgcatcggcgagctttggaaggtctcgaagtccatcggcagaatgcgccggccaatgtcgtcgaataaaaagtcgaaattgaagatctcgtggcgccgaagcaggttgctgacgccgagataccgccggtcgttgacaaaaccgatattgatcttcgccgtgcggcccggctggcgggaaacgtagttcgcgccggtcagcgctccggccgaaacgccggtcacatccgaaaaatacaggtcgttttccataaagacatcgagaacgcccgaagtgaacagcgaccgcagcgagccgccctccagaatcaatgcaccgttttccataaaaatcaccattccttattttttgtgccggtcggcgaagtcgattgccgctttgctcgtcgcggcaaatttgctcgtcgagcaaaggcacaaatcgtatgtgaaaaagtatttttcacacgattccccgtttccgcccggtcgggcctttttcgtgctttctattttcgtgatttctaaaagaattttagcacgattcaaggccgttttcaagctgagccgccaaaaaatgccgcggcacttgcgcggcgggggaatctgcggtaaaatacaagggcgaaaaaaacgaaaaggggatctgtccttgagaatccgaaagaaaaaatgggcgcggccggagcttgccgcctgtccgttttaccttgatgcgccgcaggaggccgcaggcggctgggcggcgcggtttgcgcggcccggtcagctgctgcacctcgacctcggctgcggcaaatgcacgtttctggctgcgctcgcacaccgcgagcagggcgtcaatttcatcggcgtcgatatcagtgaggatattctcggcgtcgcgcggcgcaatattgaggccgaatttgacggcgagccggtcgaaaacattgcgctgctcgcgttcaacatcgaaaagctcgacacgctgtttgcgccgcaggagaaggccgcgcgcatctacgtgaatttctgcaacccgtggcagaaggcgggcgaccacaagcgccgcctgacgcacacgcgccagctcgagacgtacaaaaaggtgcttgcgcccggcggcgagctgtggttcaagacggacaacatggacctctacctcgcgacgcagcggtatctgcgcgaggcgggctttgagattgtctgcaagaccgaggatctccacgcggagaacgcgccggacaacatcgaatcggagcacgaggtgatgttcacggcgcagggcattcgcacaaaggcgatcatcgcgcgtctgccggaggaaaaaagcggcgtggaaattccttgaacccgcgcgtttatcgcaatgagaccggcgggatttcaggtgttcgtgcgcaggcacggcagaataagaaacgggaggcgaagccccggcggccccgccgccgcagcggagagccgcacgctaaacaggcggattcaggctttttggcgcgtgcgctccgcccaaaaatcggaagaaagcaggagatcaacatggaaaaaacacagaaaacaaaaaagccgctgattctagcggcggccgctttcgtcgttctggtcgcggccggcctcgtgatttggaagttcacggcgccgcagggtacggcgggcgcgaaggcctatacgttcaccgttgtggatgccgagggcaaggagacggtgcatgagctgcacacagacgaggagatgctcggcgcggcgctgctcgacgagggcctgatcgagggcgaggacagcgaatacggcttgtttgtcaaaacggtagacggcatcacggcgaatgaggacaatcaggagtggtggagcctgacgattgacggcgagatggcgatgaccggcgtggattccacccccgtcgaggacggcggcaagtacgaattcacgctgacggtggggtactgattgcgcctgcgtctcacagcgctcagcggcgtgctcggcgctgtgctgctcgtggtgcaggtggcgcttgcacccttgccgaatatcgagcttgtctctttgctcgtcgtgctgttcacgctcgcactcggccgctatgtggcctacgcactcgcggtgtttgtccttttagaggggctgctctacggcttcggcctgtggtggttctcctacctctatatctgggcggttcttgcggtgcttgcccatctgttccggcggatggaatcgcggctcggctgggcgctgctctgcggcttttacgggctctttttcggcacgctgacggctgttcccgtctttttcctcagcggcgccgcgacagggctcgcgtatatcgtgagcggcatcccgttcgacctcacacacgcggcgggcaattttctgctcgcactgctgcttctgccgccgctgcgccgtctgcttacccatctgacaagagcgctccggctcaacgcgcctgtagatctgcacggcagtaaaaaagaatagatgaaaagagcatggcgcggcccatgctcttttgtatgtccgagagatgcgggaatccgctttttcgttgcgggcggcgccggcgcgtgctataatgaagccaaagccccccccgcctgcgcggcggtcacgctctttttcggcggggattccccgttgtgggcgctgctgatcacattgcaggcgcttgtgaccgctctgaccgggatgtacatcgaatataaggcgcacgcgcgggcggcgctcgaggcggggagggggccgcctgtgtgcacaggctcgttctttgggtcgatcggcgcggtgcgcgcgttctttgagagtccccggcgggcgcggatttttgtgaagcggcagaggtgaaaataacagacaagggggaatttggatgaatgaagaaaaattcagcggcctgagcggcctgtacgcgcggtacaggccggattatccgcaggcgctcatggaatacctgtacacggaggcggggctcacgcccgaggccgcggtggcggacgtcggcgcggggacgggtatcttcacaaagcagcttcttgaaaagggcagccgcgtgtgggcggtggagccgaacgcggacatgcgtgcgagcatgcaggagagccttggggacttcccgcgcctttcctgcgtgtccgccccggcggagcatacgggcctcgcggcgggcagcgtcgatttcgtcacggccgcgcaggctttccactggttcgaccgggcggcgtttaaggccgaatgccggcgcatcctaaagccccggggccgggtcgttctggtctggaacagccgggatgcgcagagcgcgcttgtccgggagaacgccgcgctgaaccgcgcgcattgcccggcgttccgcggcttttccggcggtttgcaggacaacccggatttctccgatttcttcgaggggacttacattgagaggcggtttgaaaatccgctgtatttcgacgagtccggttttctcgggcgcaacctctcggcctcctacgcgccgcgcgcgggcgacccggcgcaggaaaaatatgtggaggcgctgcgggcgctgtttgcccggtacagcgaaaacggcgtgctgaaaatgccgaacatcacgcgctgctacgtgggggcggtgtagtcctgtgcgggcagggtgttaccgcgatttccggcgcacgaggagaagccctgcgatgagcgtcaaaagctcggcggcaggcacggcgagccacaggcccgtgacgccgccagccgccgcgccgagcagcgcgcagggtacgacgagcactacgccgcgcagcagcgagagcagcgccgcgggcttcgcgcgctccgtcgccgcgagccgcgcggtgaaaagcaggctgacgccggagaacagataatttgtaaaatagagcgtcaggccgggcacggcaagcgccgtgagcgccgcatcgccgcggctgaacaccgagacgattgcatcgggcagcagaagcgcggccgcggagaaggcggcgccgagcagcagcgcggtgcacgcgccccagcgcgtcaggcggcggagcgcaccggcgtcaccgcccgcaaaggcgcggctgaaaagcggctgggcgccctgcgccgcgccggtcagcatcgcggtcgcgacgagcgccacgttcgcgatgatcccgtaggccgccaccgccgtgttgccggcaagcgcgagcagcagatagttgaacacgaggatcacgaccgtggaggagagctcgccgacgaatgccgagaagcccgcgccgaagatctgcgggatttccgcaaaaatcccggctcgggcggggcggtagccgcgcctgcggcacaggcacaccgcgatgccgaataccggcgacatgccggtcgcgagcaccgcgccgaacatgcccatgcctgcgatgcagacgaggtaccagtccatcacgatgttggcgaaagagccgatcagcatcgccgccatgcctcgccccggtgcgttgtcgtttcgcgtgaaggcgacgaggatgttattcagcaggaaaagcggcgaaaacaggcagcagacccgcaaataaacggtcgccggctcgagcacgccgcccgaggccccgagcagccgggcgatcgcatccgaaaaaaacaggccggcgcacacgaaaacgagcgcggccgcggcggcgagcagcaggctcccggagaaagcggaaccacagcttccggatttccgcgtgcggcagatggtgtagcgcgtcgcgccgccgatgccgatcagaagcccggtgccgttgatgatgccgtagaccggcagcgcaaggttgagcgcggcaagcgcgtccgcgccgatgtagttcgcgatgaaaaaggtatccgcgaggatgtagacggagagcccgagcatgccgagcacgctttgcaggacaaagcgcaggtaggttcgcagcatagtttatgttccttcccatgtggtttgtgaaaatcggtgcggccggggattccccgtgcggccgcacaaaaaatgcccgcagaaagccttctgagacctaacggctttctgtgggcacgcgctccgcctacccggtggcaggcggcggtgttcgtatcgacgaggttcagtatagcacgatgcgccgcgcattgcaagacatgcgcggctgtttttttgtgccgcaaagcgcgccgcgtgtttaaagggggaaaagcgagggcggcggcacgcatggaaccgggatttttagcgcacactaccgccaaaagggagtgtgcagatggattatttatgggacaatgaaaaaataccggattacccggcgctttccggtgatacaacggcggatgtcgccgtgatcggcggcggtatggcaggtgtactgtgcgcgtaccgcctgcaggaggccggtgcggactgcatcgtgattgatggcgatgtgcccggctgcggcacgacgcgcggtacgacagcggttttgaccgcgcagcacagcacgctttacagtgatctgattgcaaagcgcggtgaagcggcggcgcgccggtatttacgcgcgaatcttcgcgcggcggagcagttccgcgcgctctcggagaaaattccctgcaattttgaaacgcgtccctcgtgcatgtatacctgcggcacggcggcggaataccagcccgagcggctgtaccgcgaggcacaggccgtgcgtgcgctcgactttccggccgaatttgtccgcgatgcgggcctgccgtttcaaacgtgcggcgcggtggtttttccaaatatggcgcagtttcatccgctgcgctttctgcacgggattgcgcggggactgcacatctttgcgcgcacttatgccgagcggatcgatctcaaaacgaacacggtacacacaagccgcgggaggatacgtgcaaagaaaatcgttgtggcgacgcactttccgtttttcaaccgccgcggcctatactttgcgaagctgtatcaaacgcgttcgtatgtagcggcgctcgggcatgcgccgcagcttccgtatacgtatgtgggcacgggcgaaagcagtctctatttccgcacagcaggtgatctgctgcttgtcggcggcggggatcaccgcaccggtaagggaaagccgggcggcggcgcggactgggtgctgagcgcggcgaagcggctgttccctttggcagagccgaggcttgtctgggctgcgcaggactgcatgtcgctggatggcgtgccgtatatcggccgctacagcccgcatacgccggatctgttcgttgcgaccggcttcagtgaatggggaatgacaaccgcgatgctcgccgccgagcttttaaccgcgcagatctgccgcggcgcgtcggaggacatcgcgttctcgccgcagcgcagcagcctgcacccgcagctttttttgaacctgtgggaatcggcggtgcacctgctccgccccacggtcccgcgctgtccgcaccttggctgcgcgctgatctggaataaaagcgagcacagttgggactgcgcctgtcatgggtcgcgtttttcggcgctcggcacgccgctagagaaccccgccgtccgcgggatcaatccgcggaaaacgggcatgcgccggtgaagatatcgtttgcgcgcgtccagtcggcgacgcgcagccagtcggccgcatagtccgcccggcggttctggtgctttaggtaataggcgtgctcccaaacgtcgcagcagagcagcgggcgcaggccgcgcgccatcggcgtgtcctgattggctgttgtgatgatgcgcggccggccggtcaggtcgcggacaagccagacgtagccggagccgaacacgccgagggctgcctcggtgaaggcggcctcaaaggcggcctgcgtgccgaaagcatgcagcacagcctcttgcagcgcgccgcacggggcgcggcgggcgccgtcgggtgtcatgcccgcaaagtaaaagcggtggttgaacacgccgcccgcgctgcggcacagcgtgaggcggatgtagcgcagcgcaggcgcgttcattacggcgagctgtgccgcggtgcatttttgcagggcgggaaagggttcgatcgctcggttcaggctgtcgatgtaggccagcaggtgtcggtcgtggtgaatttccattgtgcgcgcgtcgatgtagggttccagcgcgtcaaacgcatagggcagcggggtgttttcaaacggcataggcaggcagctcctttcagaccagtatatgcgcgctctgccgcctgccatgaccggcgcgtgcaatgtaaacggcggggtgcgcacctgcgccgcaaaaaatacgggaaagcgtcaaaccgccggccttcaagccggcggttttgcctgccgccacgctgtgacggtgtgttttctgcaatgtattgagattttataaagaattttgcctttccggctgtacaacgcgcggcagttggtgtatactgttgcgtggaattctgccgcgccccggaaaatgcgggtgcgggcagttttgttttgagtatggatgggaaagggaaaacaggaaatgaagatcattattgccggagacggaaaggtcggccttgcgctgacgcggctgctttccgaggagggccacgacctcgtgacgatcgattcaaaccgcgaggtgctcgagagaaacacgcagctttatgatgtgatggcggtcgccggaaactgcgccacgatggcgacgctccgcgaggccaatgtggagcaggcggatgtgctgatcgcggcgacgagcgccgacgagatcaacctcctgtgctgtcttacggcgcgcaagctgaacccctcgctgcacacgatcgcccgtgtgcgcagcccggagtatatcgagcagctctatctgatgcgggaggatttcggcctctcgatgatcatcaacccggagcgcgaggcggcaaaggaaattttccgcctcttgaagattccgggctttttgaagcgcgagacctttgcgaaggggcgcgtggagatcgttgagctgcgggtgatggagcgcagcctgctcgaaaacgtcattctgaaccacctgccccacgttttgaacggctgcaaggtgctcgtctgcgccgtcatccgcgacggtaaggcgtttatcccaaccggcgacacgatgctgcggcgcggcgaccacatctacgtcacggcgccggtggccgttctctccgagctcgtaaagcagctcggcatcccgcagaagaagatccgccatgcgatgctgatcggcggcgggcgcgtcagctactatctggcgcagagtctgatcggcgcgggtgtgcgcgtgaagatcatcgagcagcgggccgaccgttgcctgacgcttgccaacatgctgccgcgcgcctccatcatcgaggcggacggttcctcccagagcgtgctcgacaacgagggcgtcggcgaaacggacgcgctcgtcacgctgaccggcctcgacgagcagaacgtcatcatgtcgctttacggcagtgccgagggcgtgccgcacgtcatcaccaaggtcaaccgcatggaatcgaccggcatgctcgagaacctgtccgtcggcagcgtcgtcagcccgaaggagctgtgctgcgcgcatatcgtgcagtacgtgcgcgccatgcagaatcagaccggcgcggcggtcacgctgcaccgcattgcggacgggcgcgccgaggcgctggagttcgtcgtcaacaaaaactcccgctatgtcggcgagccgctcaagcgcctgcgcctcaagccgaacatcctgatttcctgcatcacgcacaagggcaggacgattctgccggacggcaactccgccttcgagatgggcgacacggtcatcgtcgtgacgagccgcgagacgccgatcttgcagttcaacgatatctttgcataggacggttgagagattatgaatgttaaaatgctcagccggattattggccttacggttctgctgacggccgcgttcatggccgtgccgctgctgctcgcgctggtggacggcgagccgaacaatgtggctgcttacggggtgacgatgggcctgatggccgttttcggccttgcgcttttccttttcagccgcaacggcgaccgcaccttctacgcgcaggagggctttgcggccaccggcctttcgtgggtcgtcatgtccctgttcggcgcgctgccgttctgcatcggcggggagatcccgcactatatcgacgcgcttttcgagatcatctccggctttacgacgaccggcgcctcgatcctcagcgatgtggaggcgctctcgcgctgcaatatctactggcgcagcttcagccactggctcggcggcatgggcatgcttgtgttcctgctcgctgttgtgcccgaggcgcgcaagagcgcgggctccggcatgtacctgatgcgcgcggaaagcccgggcccgagcgtcggcaagctcacgccgcacctgcgccagacggcgatgatcctctacggcatgtattttctgctcacactgctgtgcgtcggctttttgctgctcggcggcatgccggtgttcgacagcttctgcatcgcgttcggcaccgccggcaccggcggcttttcgatccgcaacagcggtatggcggattacagcgcctacctgcaaagcgttgtcacgatcttcatgtttctgttcggcgtgaatttcagcctatactttctgcttttgatccgccagttcaagagcgtgtttaaaaacgaggagcttcggctgtacgcgggcattgctgccggctcgatcctcctgattacggtcaacatcaccggcatgtacggcagtgtccgcgaggcgctgcaccacgcagcgtttcaggtcagcagcatcatgacgacgaccggctacgcctcggtggatttcgagcagtggcccgccttttcaaaggccgtgctctttgcgctgatgttcgtcggcgcctgcgcgggcagcaccgccggcggcctcaaggtctcccgcgtcttgctgctgctcaagagtatccgccgcacggtgcgcaaggcgcttcacccgcgccgcgtgcagagcgtccgcatggacgggcacgtcatcgacgaggagacctcgaacaatgtcaacgcctatctcgcggtctactgcgtgattctgctcttgagcttcgtcgtcatctcggtggacggctattcgatcggcacgaacatttcggctgtcgccgcctgcttcaataatgtcggcccgggcttcgagctggtcggcgccaccggcaattacggccattacagcgatttctcgaagctggtgctttcggcggatatgctgctcggccgcctcgagatcttcccgctgctcgtgcttttcagccccgatacgtggagccgcaagcggtaaaaaacataagaatcagggaaccgcggtattctgcgccgccgcccgtctgtcgtacagtgtaaagactgcacggcggcaggaagcggcgcgcactaccgcggtttttgcatgcccttggcgcaggggcgcccccgggtgcaagcgcggcggccggagggcgcgtactgcgccgcatgcagccggcatctgccgcataggagcgcggcacctgagaatccgggtgaagccgcctgcacgggtatgccggagggcgcgcttcaggagcgtacgagcgcctgaaaatggtcggcaaactgctcggaaagcgcgtacaggcagccgacggcctcccgctcgggcaggcgcgcgggaagctgcgcaccccggccggcatgccgtgcgccgcggtgctttgcgcggtcgtccgcgcgttcccagacgcatacgagcagctccgcaaggcagagcagcaggcagaatgccgcggttcccaaaagaatatacagcataaaatgacctccaaaccaaaacacaagttccgaatataagttctttcaaagttgattataaacaatagttcgttcgatgtcaatcgaacatttcacttttttcaacttttttcgcgcttttatcggcgccgcacggtctgccgggaattttcgggcggcgatgaggcacggattttcccgccgcgcttattatgaaaacagggagcaagcaggagagaaaggacagtgatcacatgaatccctctgattttcaggccgccgttgagcggcataaggcggatatgatgcagctggccgcgcgcagcggccagccggagaatacggtcggaacgccgatcgacctgccggaggaggacggcgcgatcgtctacccgccggaggccggcgcggggcgcgacccgctgcaaacgctggagccggagcagaacaccttcgaggtttttcaaaagctgaatcctaaaacggggtttctgcgcgtacaggcctttgcgggccggcagacgatgccggtgccaaatgccacggtgctcgtgacgcacacgtttaccgacggtacgcggcgctttgcctcgggcgtgacggatgagagcggcgtgctcgacggcatcgcgctgccggcgccgtccggcacgctcgcgcagtcgccgacgggcgaaatgccctacgcgctgtacgacatccgcgtcagccacccggacttccgcacggaggtctttcagcaggtccccgttttcgaggggatcaaatcaattcagccggtgcggttcctttccgaccacacgggcccgtgacggatagaaaggagcgcgacgtatggcactgcgcagcacaccggttatcccggaatacatcaccgtgcacctcggcctgccggaccagccggcggaaaatgtgcgggtgagctttgcggactacatcaagaacgtggcttcaagcgagatctacccgaactggccggaggccgcggtccgcgccaacattctggcccagatttcctacgccctgaaccgcgtctacacggagttttaccgcagtcagggctacgatttcgatattacgagcaccacacagtatgaccagatgtttatcaacggccgtgacgtctttgaaaacatttcgcagatcgtggacgacatcttcaacgactacattgtaaagcagggcaacgtgcagccccttttcgcccaatactgcaacggaaccacctcgaagtgcgccgggctctcccagtggggcaccgtcgatctggcgaagcagggcatgatcccctacgagatcctgcagcactactatgggaatgacatcaacatcatcttcaacgcgccggtcgccgacgtgcccctgtcgtacccgggccgcccgctgcgcatcggcagcgtgggcgaggaggtccgcatcatcaagcggcagttaaaccgcatcggcgagaactacccggcgatcccgaaaatccccgagctgaacggctacttcaaccgccagacggaggacgccgtcaaggcgttccagaagattttcaacctcgaggtggacggcgttgtcggcaaggcgacgtggtataagatcaagtcgatctacaacggtatcaaacgactgaacgagctgtattcggaggggctgacgcccgaggaggtcgagcgcttttaccccgaggtgctgcgcgagggcgacaccgggcgctatgtgcaggagatgcagcttatcctcgcggtcatcgcgtttttcgacaaccagatccctctgccgtcggtgaacggcgtgttcgacgcgccgacgcgtgaatcgctgatggcattccagcggcagtatggccttacgccggacggcgttctcgggcgcaattcctcgaataaactgatcgaggtttaccgcgatacggtcgcgaacgtcccgttcgacgcggtgccggacagcagcttcctgtacccgggccggtacgttttgcagggcatgcgcggcgacgaggtgcgcgacctgcaaaatctcatcaacctcgcggcgcagacgcaggattatatcccgacgctgcatgtcgacggcatcttcggctcgaacacggagagcgccgtgcgcgcgatccagcagcacgaggggctggaggtcaacggcattgtggggccgatcacgtggaaccgcatcgcggatctcgcgcggaaaagcgaataaaaagcggccggataccgggaggcttcccggctccggccatttaggcggcgtgcaggtggatccgcacgccgccgctttattctgccctgccccacttttgccgttgtctttcgcgcggggaaatggtatacttttttcaaggggagtggttaaagcatgaggatgtatattgtcggctccgtcgcaagcggaaaatcaacgcttgcgcggcagctttccgcgcggaccggcgtgccctgcgtgcacctcgacgacgtcgtgtacgagccggacagcacggacccggcgggcaaccgcaagcgcccggaggccgagcgggagcggctgtttcaggaaattcttgccggggattttctcatagaggataccgggcgggcgatgtttgaggaggggctgcggcgcgcggagcagatcgtcgtgcttgagcttccgttccgcacgcgctgccggcggattttcacgcgccatatccggcagacgctggggcttgaggcgtgcggctaccggccgagcctgcgcatggtgcgcgatatgttccgctgggcccgcaatttcgataccggggccgacggcgtcaaggcgcgcatcgcgccgtatagggagaaaaccgtcgcgctccgcagcgtcggggcggtgcgggaatttgtggaaagcatggggcgtgcgcaggctgcggcccgcgcgggaaaggatggaagcgaacgtgattgacgaagcggtaagggagaaaaacaaacggtattggaacggcgcggccgataactggttcggcgcgacggcgctgcccgaatacggcgtgtactgtgtgacggaggacgagctgcaccttttcgacggcatgcgcggcaagcggctcttggaggtcggctgcggcagcggacactcgctcgtgtggcaggcgcagcacggcgcgggcgagctgtgggggctcgatatttccgagggccagctcaaaaacgcggcgcgccatctcgccgaaaacggtgtggaggcgcgcctcgtgtgctcgccgatggaggagccctgcggcattccggagggctatttcgactgcgtctattcgatctacgccatcggctggtcgaccgaccttgcctgcacgttccggcgcctcgcggcgtacctaaagccgggcggcacgctgattttcagctggaaccacccgcttttcgggcgcgcgggctgcgtgcacatgcaggacggaaagctggttttcgacaagagctacttcgaccggggcgacacgcagttcaccatggacgacggcgtgctctacctgcgtaattacggcatctcggactatgtgaacgcgctcgccgatgcgggctttcggatcgagcggctcgtggagcagaccgacgccgaaacgctcgccgcctccggcgcgctgccggatagggtgcggcaggcgcagatgcacccgctttcctttattttcaaggcgcggaaaatgtagaaaaaataagcgtgcggcacggggccgcgcgccagagcggctgtcttttcaggcagccgctttttcgatgggcagcgcttttgtgtaccgcgcgatcatccacaccgcatagacggcgacgagcgcctcggtgatgggcatggcgagccaaacggcccccgcgcccgccagcggcggaagcagcagaatcaaaatcccgctgatcacacagccgcgcaggaccgataccgcgaaggcggccttcgggcggatcagcgcctgaaaatagtaggtggagaagatattcagcggcagaagaataaacgagaggctgtagcagcggatgatggccggcgcgatttcgaggatcgccgcggtcggcttcatgaagatatagacgtacaggttcgggcagagcaggctgagcgccgtccagaacacgctgaacacggcggcggtgcaaagcgcgtaccgcagggtttcccggatgcggcggccgcgccccgcgccgaagttcaccgagatcagcggctgggcggcctgcccgacgctgtaggcgcagcactggacaaaggtgctcacgtttacgatcgggccgtagacggcgagcgcatccgtgccgagatactgcatgatctgccggttgaagagcacggtcagaatccccatcgcgacgtcgatgaagaacgttgagaagccggtgacggcgatttccttgagcttgaagaagaaccgcgtcggcctgcgcagggtcagcgtgtttttcttcgagaaaaagtgcgtgagcatcacgaggaaggtgagggcggagccgatcgccgtggcgaggcccgcgccgtacacgcccatgtctagcgtgaacacgaagaagtaatcgccggcgacattgaacaggccgcccgcgagcacgccggccgtggcgaggccggggtggccgtcgttgcgcaggaacgcggcgagcatctggttgaacaggaagatcggcagcacggctttgaccggctccagataggtctgcgcgagggggagcaggctgctgtccgcaccgaaaaagagcaggacgggctccgcaaagaacaggatgccgagccacgccagagcggcaagcagcagggaaccgatgacagaaaccgtgaagtattcgctttccgcctcggttttccgcccgttccggccgcggacggtgctgaaaatgacggagccgccgatgcccatcagcaggccgaggctgtagatgatgttccagaccggggcgacgacggccagtgccgccgtgccgctcggaccctgatactgcccgaccattgccatatcgacaatcgagtacaccgaggtgatcatggcgctgccgaacgcggcggacaggtacttcaggtagacgggtttgatttttccattgatcaggtccatagctttgtcctccataaaaaacaaaaaggccggataaaaaaccgggcagaagcggttctcttatccggcgccctcatacgtgagagcggcctccggcgaaccgtgtgcccagcatcttatccggccttatacttacgattataagccctccgacaaaacattattataccacatttaaaaaacttgtcaagccctgcggcgcatttttttcggcggcgcatcgcccggcgcgccgcgggcggctctgccgggaaatttcggcaagacctttttttgcgcgccgaaatgtggtatactctctggtgtgcggccgcagccgcgcaccccaccgcatcaaggagtgagatttatgaaattcggcagggcattgcgggaagtcgtccgcttcgaggtcctgtacaagctgttcgtcctctgcctcgtgaaccccgccatgcgggagatctaccagacgtatgtctcatcggtcggcgtttcattcaacgcgcagatgctcggcacttttctgaacctaaagggcggcctgctgtttctggcgctgtttttcctgtccgcgctgctggtcttttacgagctgagcgtcgttgtcaacatcgtcgcgctgtgccgggagggcacgccgttccggctgcgcacggttctcaaggcctccgtgtggaacctcggcgcgatgcgcggcccaggcattatcccggcggcgctctactacgtgctgtttctgccgcacgtgcggcttggctatgtcaacacgctggtgccgagcgtcacgatcccggagttcattttcgacgcgatgcgccgcacgccgccgctcgggcagatcggcatgatcctgtacaatgttctcgtgtacgccgcgtttcttctgcttttgttcgtgccggtgcgcatggtgctgcgccgcgagcggttcggcgcggcggttcggggcgggctctcctgctggaagcagctcggcgcactgggcgccgcgcaggtgatcgccgtcctgtttatctggaatcagggcatgacggaaatcgcgcgcttctggcggcgcaacccgctggaaaacagcgattttgacgggaattttttgaagtttctcgtctattccgaggcgtttcggaaggatctcgtctactgggtgcttatggcggtgctgctctccgcgggcatggccgcgttcctgtatgttgttctgcgccgcctttcagataaggccggcctgcacccgacgctgtaccccgactggcagggcgacggcggcgtgctgctcgccatcgcggtgcacaggctgaaggggcttgcagcgcgcgtgcgggcggcctttaaaaagaagcgctggaaagcggccgcgggcgcggcgggcctgctctttgcggcgtacctcgtgctcggcctctggcagccgccgctcgtgcatgcgccgctctccatcggccaccgcggctgcaatctggagattgaaaacaccgtggaggccgtgctcgcggcggacgcggacggcatggattacgccgagatcgacgtgcagctcacggcggacggcgtgccggtgatcttccacgacacggccctttcgcgcctttcggacgcttcgggcaacgtttcggactacgcttgggacgagctgcaggcggtcgagctgcgcgacgaatacagctaccccggcaaaaccgcgcgcatcccttcgctcgaggagatgctgcgggcggtgcaggatgcgccgaacggcatcggccttttgatcgagctgaagggcgacacgctgcggcaggaacagcttgccgcggcggtgacggcgctcgtcgagcagtacgatttcggcagccgcgccatgtttatgtcgctcgattactacagcgtgctttccatacacgccgcgcacccggagtggtgggtgggctactgtgtgttcggcagcgccggcgacatcgacgattcaatctggcgctacgacatcgattttctcgcggtggaggaaagcatggtcaccaaccgcctcgtgacgcaggcgcgcggctacggcctgccggtctacgtctggagtgtcaacgacgatgaaaagacgcttcagtgcatggagatgggcgtggtcggcctcatcagcgactggacggatacggccgcgacggtcgaggcctacgaggccgcgcacagcggcgtcgagtacgccgggcgggacgaagtgcccgcgcaggatacggcccggctgcagtgaccgccctgcataaacgaacaaatggttgacaagctgcacggcgcgcgctatactgaatacagcagaaaaacgatgggaggatgctgtatgagacaaaaggttcgaatcaccgtgctgaagaaggaattttatccggagatcgccgacgcgtatctgaccgcgggccgcgaagcgggaccatgcccgatcctgaacgagggggacagctttgtgtacgcaggcggtgccgttatgcccgaggggttctgcccatgggcatggactgagctgtacagcaaggtgaacgcgatggccgggcgtgtggaaaacaactggtacaagccgaacgtcagtattggctgctgctcggacggcgtgcgtcctgtcgtgttttgcctgaagggcctgaacgagccgaacgaagaagaggaataaaagcgaagaataggggcggcgcttgccgtccctgtcctttttcatcgtatgcggagccgggcatgcccggcctttttattcctttgtgccctgtgccggcggcgcgccgcagtcggtgcggcagccttcgtcgaaatggtcgcgctgcacgctcgcgtagaagcggtagccgcccgcgaagttgcggcagtcaaagccgttctgggcgaggatgcggcaggcgatgtagctgcgcaggccggactggcacatcacatagacgggcttcgagttatcgagctcgccgatgcgcgcgcgcaggtcgtcgaccgggatgtgcgtcgtgaagccctcggcatggccgccggcgtattcgccgtttgtgcgggtgtcgagcagcgtcacgctgccgtccgtcgggagcgcggcgagatcctcgtaaaagaactgcttcacccggccggaaagcacgttttccgcgatgaagccggccatgttgaccgggtcctttgcggaggcgtatggcggcgcgtaggcgaggtcgagatctgtcagcgctgtgaccggcaggccggcctgcatggcggtggcgaacacgtcgatgcgcttgtctacgccgtcgaagccgacgatctgcgcgccgagaatgcgctcgcccgcgggggagaacagcagctttatcgtcatcaccgagccgcccggatagtaggcggcgtgcgaggccggggagaggatgattttctgataggggatgcccgccgcctgtgccgcgcgctccgaaaggccggtcgaggccgcggtcatgtcgaacacctttaagaccgaggtgccggcggcgcccttgtaggtgctttccagaccggcgatgttgtccgccgcgatgcgcccctgcttgttcgcggggcctgcgagcggcaccgtcgtgcgctggcccgtgacccggtgcgcgatctcgaccgcgtcgccgaccgcgtagatatcggggtcgctcgtctgcatgcggtcgttcacggcgatgctgccgcgcgcgccgagcgaaagcccggcgtcccgggcgaggcggctgtccggcgcaacgccgatcgcgagaatcacgaggtcggtttcgagctctgcgccgtcgccgagcgaaacgcgcacgccgctttccgtatccgcaaagcccgcgaccgcacggccgagcagcagctcgacgccgtgctttttcatgtgcgcgtggaggaagctcgccatgtcgccgtcgaactggccgagcacctgcggctgcatctcgatgaggctgaccgccatgccgagcccgcgcaggttttcggccatctcaacgccgatgaagccgccgccgaccacaacggccgatttcagcttctgccccacggccatcgcgcggatgcgcagcgtgtcctccactgtgcgcagcgtctggatccgctcgctctcgatgcccggcaacttcgggcgcaccggcacggcgccgggcgaaaggatcagcttgtcgtagctttccgtcaggcgctcgccggtttcgaggtttagaaccgacacggtctttttttcgcggtcgatggccgtgacctcgtggcgcacgcgcgcgtcgatgcgaaagcggcgccaaaagctctgcggcgtttgcagcgtcaggtcgctttcgttctcgatcgtgccgccgatgtagtacggcagcccgcagttcgcgtaggaaatgaagcccgagcgctcgaagatgatgatttcggccgtttcgtcgagccggcgcagccgtgccgcggcggaagcgccgcccgcgacgccgccgatgatgacgactttcattgcgttttcctccccttttcggtttattggagcatagcgagaatgctgtccttcggctgcacgccgaccgccgtctgcacggccttgccgtcgcggatgacgacgagcgtcgggatgctcgcgatctggaaggcggaggcgagctccggctcctcgtcgacgttgaccttgccgaccttcacgcggcccgcggtttcctctgcgatctgctcgatgacaggcgcgagcatgcggcacgggccgcaccagcttgcccagaaatcgatgaggacgggcagcttcgactgcatgacctccgcgtcaaaattgttttttgtaatggttaattctgccatttgaatcacagatcctttctgaattcttttaaatcataagctggagcccggccttttccgagcctctggctgtagtttaccgcattttcacgtatttgtctgtgacaaggtcgcattcggcagaaaaatttcaaaaaaatttctccggcagagcgccggagaaggtgaggctatatttttcgcagggcttcggggtccgtgagccgcacggcgccgcgcttgagctcgacgaggccgtccgccgaaaagcgcttgagcatccgcgcgacgacctcgcgcgccgagctgatctgccgggcgatctcctcgtgcgtcatgcggagctcgccgctgccggttttctcgctttccgaaagcaggaaatccgcgagccgccggtcaaccttttcaaacaggatgcgctgcatcgtccacatcacggcagaaaagcgctccgtcgcaagctcgtataaaaagcagcgcacatagatgttctcctccgtcagctttttgaacaccgcggcgccgacgatcaagaggtcgcagtcggtttccgcctccatctgcgtgtcaaaggtaatctggctgacgacgcaggcggccgagagcacgcaggggtcgcccgtttcaagccggaacagcgtgatttcgcgcccctcctcggagagcaggtaggtacgcaggctgccgtgcaggacgcagatcatcccgaggcaggcgctgccgccgctgtggatgacgctgcccttcgggtagtgccgcacgaccgcgtgacgcgcgacggcgtcccgctccgcgtccgtcaggtcgccccagtacggcagccggggcagatgctgtgcgatgttttccatggtcggcctcctgtctgcgcctcaccgcgttccttttgaggtgaagcgccctgctgtaatcatagcacacaggggcgcttctgcgcaaccgctccgggaaaattctccgcgcacaggaggcgtgccggctaggcgcgcgccaaaatttttcgtgccgtttccatttcctgctcgaggagagcggcgaggcggctgcacgattcgtcgagcacgatatggttttcgcgcaggagcgccgccttgtacagcccgtttttgacggcgtgccatgcggcgcgggtgctttcacaggcgaaaaggggcgcctgctccaaggcgccggcctcctcgagaaagcggcggtacagggcgcggccggtcagcagcgcgtcggcaaattttgcggggaaaaagcgcgtctcctccgccgcaagccagcgggatgcgcgtgccggaaaggcgcgcagcagcgcggggtggcgttcgagaacctccgccgcctgtgtgcggagcggctcgggcggctttgctgggatgccgccgtgaaagcggacggcgatcagcgcatagccggcgcggagcgcttcggccggcagcgtctgcccggagaggccgtaggtcgggtcgaagcagagcgcctgctccgcgcccgttttccgcacgatgaagtagtgcgggccgtgctgcagcccgaagagcggcgtccacgggatgcggaacgcgtccatgccggcgagggcgaaggcgcccggcggcatgctctgccacgcggccgcgcgggcctccggggtgacgcacggcgtgccgagcgccatgcccatgctctccagcgcgcggggcagccggcgggtcagaaatacgccgcagatcgggtcgtagcgcaggctgctttccgcccagaggcgggagaacgcccgggtgcaggggagcccgaaatgctgcgccagcgtgacgatgcaggcgtggtagcagttaagcgccggaaattggatcagctccatgcttcactccctccgcggcgcgccggtttttcccggtggacgtcttttcgatgcgcgccgtaagccggatccggcgcgggcgcttgtagtcggccagatgtgctgcgcaccagttctgcacggcctccgccgtgacgccggcagcggcgggcacgatgtcggcgcagacggtctccgtcccgggctggtcctctgcgccgaacaccacgcagtccgccacgagcgggcactcgagcaggcggccttccacctcctcggggtatacgttgaagccgcggacgaggagcatgcttttcttgcgcccgcagatgtagaggtagccgtctcggtcgaaatagccgatatccccggtgtgcagccagccgtcccgcaggatctcccgggttgccgcctcgtcgccgtagtacccgagcatcacgttcggcccctgcacgacgatctcgcccggacagtccggtgcgtcggtgcgcccggtttccgtttccaaaagcaccttgacgcccggcaggggcacgccgacggagccgagcttttccgcgggcagcgcctgaaacggctgggcaatcagcggggaggcctccgtcatgccgtagccggaccagaagcgcacgctgggaaaatcggcggagagccgctccagcgttccgtccgggattttgctgccgccgaagccgaagtaccgcagcgcggaaatatcgtaggggatggcgtgcccgcgcgccttatccatcagaacggccgcgatggcgccgccgtcgtaatggctgatccgcagggcctccgcgccgcggtaaagcatgtcgagcgaaaaatcctccgccatcggcagcatggggaagccgcgcaggacgcaggaaaaagcgacgagaaggccatagatcccgtaaagcggcgtgccgagcgcgtagcgggggtcggggtcccggtatttttcaaagcccatgtgccgcaggtatgcggcggcgttgaaagccatgttgtgctcggagagctgcaccagctttgcccggcccgtggtgccggaggaggcgagcagcagcatgggcgcggttgggtctgccgtgcagacaggagggaatgccccggaaaagggcgggacgtcctcgatgcagaggatggcgggcggtaccgggcaggcctgcgcggcggcgttgcaccgcgcgagcagcgccttgctcgtgaggatcacccggacgggcgacaggcggagcagcgatgcgagctcgtctgcctgcagccgcgtgctcagcgggagggctgtgccgcccgcctgcaaaacggcgaacagcgcggcgagaaagccgctgccgtcgggcaggagcagcgcggcggggcggccgtctccggccggcaaagcggcttgcagcgccgccgcttgccgcgcgagcgccgcgtaggagacggatgattcaaagcccagaacggcggggcgtgcctgatgctttctcgcgagcagtgcggtccggatcacggcgaaccctcccctcgtttggcttccacgagcgcggcgagctggccggcggcgcggcagccctgcatttccggcagctcgatggtgacgtggtagcgcgactcgatctcgaccaataggcagacgaaggagagggagtcgaggtgcaggtctcggtacaggtcggttttctccgtgaccggcacggaaagcgcgctgctttcgccgatcagcccgaggatttcttcgcggatagacatcgttttcaccctgctttccagaaaaatggggaagagacgccgggaaatggcggcgcctcttcgggttttgctcattcgatgaaaatgccgccgctgatggaggcggtcgtatactgctcgtcggcgctgccttccgccgtgatccccatgatgatggcgaccagcgtgccggcgggcagcgaaatattcatcccgttccggtttgcccggcggagcgagtatttcggaatatccgcgccgctcgtgtagggcggaaattcgatcatgctttccggaagcacgcgcagcgtgaggctgtcggccgtgccggtcgcaaggcacatgaacgggcggagcgtcacgccggccgcaagggaaagcgtctgccggtttgcgaacacgccgtagatattctgcaccgtgccgtcgtagggcatgacaaaagaggggggatacgattgattttcgctgattgtgatggttccggaggcccattcaccgggggccagcgacatataatagcccatgtcgccgccgaaacccacataggcgacttgcgtcgggacgcctgcgccgtcggtgctgagctccgcgcccgaggcatagcggttcgaaagagaaaatggaatggtagctgccataggcccctgtggcccggtggtgcccgtaggtccgacgccgcccgttgccccggccgtaccggtcggacctgcggggcctgtcgctccggccgcgcctgtgggacctgtggggcctgtcgctccatctgctccggccgcgcctgtgggacctgtggggcctgtcgctccatctgctccggccgcgcctgttgggcctgtggggcctgtcgctccggccgtgcctgttggacccgtgggacccgtcgctccggccgtgcctgttggacccgtggcacccgtcgccccggccgcgcctgtgggacccgtcgccccagtcgcccccgtaggcccggtgctgcccgttgcgccgacaatgccgtctgtgccggcttcgcccttggggccggcttcgcccttggggccggcttcgccggcgaagccgcgttcgccctgtgcgcctgttgcgccgaccgcgccgtctgtgccggccgtgccggcaggtccctgcgggccggccggaccctgcgggccctgttccccggcaggcccttgcgggccggccgggccctgcggtccctgttccccggcaggcccttgcgggccggccgggccctgcggcccttgtgcaccggcgggcccctgcggtccgggaggtccggagcagcagtaggcggcaggcgggcagaccggctgctctgggcggtagatgttcatgtggtccggaggccgccgcttgccgcggcagtcgccggaccggtcgttttgagacatatctgttacctccaagttgaaacgcaagcgcatggctatccgcatacagcatatgcgcggaagcaccgaaaggtgcgtgcccgccgaaaaagcttgcagcaggccgaagcgctgtgcacgcgtttacaagcgaacagcgcaggcgtagtgtgactttttgcggagaaggagcggaaatttgagcggtaaggccgtgtcttgcgcagaaaaaggcggcgaacttcaagggttcgccgcgacgtggaggggacggttagaatcgatattttcaaaaggcatagagcttgtggaaactaaatcttatattcccggtcaacagctgcttttgacgccgtaggacaacaatctttccctgtgtttttgcggctcgagccaatcaacaatgcagtctttacacagtatttttgatttgaactgcactgcttcatgcaggacatactcctctgaaatatcaaatatacgcaaaatcccatcctgtccggcacacgccagcatttgtaaagacgggaatgtaacggcacgaatgatacaggccacatccgtttcattcaacaaacgtgtttcaatcgaggatccgcaaatgacggaataaaggcggatcatcccattgctgtggccgcagcataataagtaggcttcatcagtgatgtgtactgccgccgcagttatcaaagttttttcatccagcagcttgacggaagagaaactccagccgctttctgcactttgaaaaacaagacgtgcgctgtcctgaccgcgatacaccagcgtcctgttgttgtcaaatagtacggcttcggcataatcctcaataggatagttattgaagatgacattgcaggttttcagatcgtatagcgttagaaagccattctgcttatatagcagcctttggtcattcatgtcacaaatatatatatttgtgaggtcgtggacgccgccctgcggcgcaattttttcctcctgaatcgcgccgaagcatagctgcttaccggagtacagcatcattccgccataggatactgcgatgcccgtatattgcccgccggcaggaataacagtacactgtggtgcagagaaattcttccatttccgcagaatgccgtttccgtacagcgcatacagatagggctgctcctcatctgccgcccgtaccgccaacagttctttagtttcatccagccgcacgccggtaaggtcgcaaaatgataggtttgcgcccgtgatatttacattatcaagatttgcgtaacggagtgacgtgcccgaaaaatctcggccggacagatcagctccggtcaatacaacattgttcaatacgagctttcttaaatctatttcagggacttgtttccatgcggcgtaataaaggctcagcgctgctgaacccaaccgtgcggttcggcagtcatctttggcgcagccgcgcgtggaagttaccatacgggcaaggctttgccgcaccttttcatctcttcccgttcaaataataccttacgttccatggttgcccgtgaaaaagaaccgtatatggagatattgtccggaacgacgatctcttcatccaataggatggatttcagcatatcgaggaacagcggcttggaggcaagctccataacatcgtgggtggcacagagtcgctgcaggcgttccagacaattgtttttttcagcgaaggctgtcaagcagtccatcttctcttgaaagccaatgggcagcaggcgtattacctttggattggcaaagcagctgataagctttcctttgaccgactgaaacacgggatagcgcgaggtgacaatcaccttggcgccagagaaaaacctgatagccgcgcatagtcggacagcatttttctccactgtttgcagatccataccggttgacatttcgtcaaagccatctaaaatgaccagtatcttatacttttccgctaagtttctccactgctctaaatttgcgccgaactgctccaagcgcaatcacaagaaatcctgcgccgcatcatcatagatttcgttctctgctgcgcgctgtgtttctccggtcaacgcataccatatggcggctcgctgggcaacaatctctttgtgggtacgccaatacagctcgttctactcgagagaactatcgggcagaaacaaaaaggccaagtcattttccaaaagcctgctgtggggagtatccagcagcttcagctgctccagcgtatgaaaggcctcctcaaaacgcccgcttcctatacgcgcgcgcaattcagcaaataatatttcaaattgggcagcggggtcatatccaagtatagcgtcaggccctttactgctattattaaagactgcgggaatcttccatttcactaaaagttcttcagaaaatccaaatagcaataagtttccatattatttgctgggactgcgccgcgcagctttggccgcattccgcacaaaataaaaggccgctcagtacacgctgcgagttgtatcaggcggccttcctctgatgggtatatccatccgcattgctccgcctgctcttctcttcctgcaccaaaaagaagtcgtaaaagttgacaatacagtcaatgtacttctgattggaaagcagattgctgagaatcggctgtgttcaatgccccttcctttgggggatgggatatcgctcttgataaagaaagtccgagtgtccatatgaacactcggactggtcgaggtgacaggattcgaacctgcggcatcttggtcccaaaccaagcgcgctaccatctgcgctacacctcggtataaccggcttgctgtgcggacgctttctgcaaagcggcggcacggcgtgaagctattatacagcaagccggcatgcgatgtcaaggctttatgcggcgattctcgctgagagcaggacgaggtcggctgcgtccgccgtgccgtctccgttcaggtcggcggcgaaggctgctgcgtcgtcgagcgcggcatctccggccagcacgcgctggaaaagccgcaggtcggcggtgttcacggtgccggaggcattgaggtcgcccgggacgatcacggtgtacaggtcgccgtcgaccatggcaatctggtcggtcttgagctttccggcggccgcggacatgtttttcgtgtagacctccacgtccgccggggcaagagcgtcgcgcaggcgcgccgccgtcgtgcccgcgggcacgatcagatacgtgccgctgaaggcgacctccacgcgctccgggtcgggcgtgggcaagggcgtcggcgaggcggtgggtgtcggcgtggccggctgcgtgaattccccgtagggcacgcggtaaaacgcgccctcgcggcggatgagcatcgcgctgccggtcagagcctcgagcgtgccgtcggcggggtgcagcgcgacggctccgcccgcggtgtcaaaacgcgagacggtctgcgggtccgaggcccaaaagaagctgccgccggcataggcggtcaaaacggccgtggggttcgccccggtgcgcagcagtatagtgccgtcggtggtgcagaggtttccctcgctgtcgatgtatgtctccgcgtcgagcatcttgtgcgggacgtccgcggcggcgggaaacacgtccgcgccggcctgcgggaaatccgcatggagggcgatgcgctcaacgtgcccgtcgaaaaagacgaacagcgtttcgtctaaaacctgcatgccgcgcaccggctcggcgaaaagcaggctgccggtgtatccgcccgcctcatcgtagacgaggatctcgttcggctcgccgaacagcacggcgtacagccgcccgaagccatcggcctccagaaaggagagcacctcgcccgcgatttcaagcgggaaaaagcccggcagcgatgtggtttcctcgagcgtgtccgcgtcaaagcgctgcaccgcgaggaaatcgccgagatcgctcacgacggtcacgacgcccgcgcgcagaaaggcgtgctgcccggggtattccgcgacggcgctgcgggagccgtccgcggcggcgatgtacgtcgtgtcgtctgtataggcgaaaagctcggtgttgccgcagggctcgaagaggaggacggaggcgtccggcgaaaccgcgccggtgagcgcctcgcctgcggaagttcccgaaaccgccggcgcaaggacgagcaggacggcggcgagcaggagcgccgggagcgccgtgggccgaaatgcttttttcatggttgcgcctcctgtttccgcccgaacgtgccgcggtctgcatagaaaaataaatcgtcgggcagcaaaatgtggtaatcatacggtaacatagcgcgcaccggcagggcggcttgcgtgaaaaagaaccacgaagcgccccgcagcaggagcatgcagggcgctggaagcggttttattcgtcgtttgtgccgtagtatttggcgaggccgccctcgccggtctcccggtatttcgagaagaggtcgcgccccgtctcgtacattgtgtgcacaacgacgtcgaacgagatcttgcgcgtgtaggtgagaaaattcgcgaggctcagcgcgttgatcgcgcgcatggcagccacggcgttgcgctcgatgcaggggatctgcacgagtccgcgcacggggtcgcaggtgaggccgaggtggtgctccatcgcaacctcggcggcgtactcgatctggtcgagctccatgccgtgcagctcggcgagcgcggcggcggccatcgagcaggcgctgccgatttcggcctggcagccgcactctgcgccgctgatcgaggcattcgtcttaattaggttgccgatgacgccgcccgccgcgagcgcgcggaggatctcggtatctgaaaaaccgcggcgttcctgcatgtagagcagcaccgagggcaaaacgccgcaggcgccgcaggtgggcgcggtgacgatgacgccgcccgaggcattttcctcgctgaccgcgtaggcgtaggcgcacacgaggcggttttcacgcgtttcggcgctctcgtcgatgtgcttctggcggtagagcatcttcgccttgcgctgcacgtccagcccgcccttgagcgtgccctcggtgtcgaggccgcgcgccacggcgtttttcatgcacttccacacttcgccgaggtaaagccagatcgaatcgccctcgcactgctccacatactgccaaaggcgcatgcggtgctccgcgcagtacgccttgatctccgcaaaggtggagagcgggtaaacgtcggccggcgtgtcgggggtgtcgccgtcaacgacgatcttgccgccgccgacgctgatgacgcgctcgaaatcgacggttttcccgtcttgcagcgcggtcagctccatcgtattcgggtgcgggagcggcctatccgaaaaatcgaagcggatctcgaccggccgcggcgcaaaggttttttcgaggatcgcgtcggtcaggtggccggggccggttttggcgagcgagccgtacaacgtggcgataaagccgtccgcgcgcaggttccgctccttaaagcgcgatgcggcgcgctccggccccatcgtgtgcgagcttgagggccctgtgccgatcctgtaaagttccttgagtgattccatgccgaagctgtcctttccgttcctgttctgattctgtattgtaccgtttgaaggtgaaatatgcgtgtgaagcgggttaaatctgcggcttttggagcgcgccgctcacttctttttcagcgggcgctcatggccgtcctcgtccacgagcaccatgttgtcgagctgcgccctaaggctctcgcggtacgcggcgatgtattcggcgcgcagcgcctgctgctcgcttttttccgccggcgtaagcccctcggcctttgccttctgtgcgagaaaattgatgcgttcgatttttttctgttccatgaatgcagttcctttcttcaaagcggccgggcacgggcggctattccgcctcgagctcggcggccgtgccgtcgatgatatttttggcccagatgcccgagcgcagcaggcagatgccgatgatgaccttcacgatgtcggcaaactgcacgcagaagtatacccagacgaccggcagcgccgtaaaccggcaaaggcagaatgcgatgggcagcgggacgacccacgtgtacaggcagtcaaacaaaaaggtgatgaaggtcttgccgccggagcggatcgtgaaatacgtcacgtgcgcgaaggcctgaatcggcagaacggcgccggcgacgagcagaagctgcgtcgtgagcgcgcgcacggcgggctccgtgttgtagatcatcgggatgaacggcgcgcagagcgcgatcagcccgccgacgccgacgtgcagcgcgacggtgaaaaagaggagcttgttgtctgtgcgctttgcctcctcgatctcgccggcgccgagcttctggccgatcagaatcgagacggcgttgcccatcgcgaacatgatgacgcagaacaggttccacgcggtgttcgtgatgttcgtcgccgcaacgaccgtcaggccgcgcgtcgaatagctctggcttaccatcgtggtgccgatgctccaaagcagctcgttgagcacgagcggcgtgccggtcgcgaggatacggcgcacgatgtcgcccggaatgtgcagactcttgaaggcgtcgataataaaggggtatttttccgggtggcggtgcgtctgcaccatcaggtaggcggcctccacatagcgggagataaccgtcgcgatcgccgcgccgaccacgccgagccgcggcgcgccgaagctgccgaagattaaaatgtagttgagcacgaagttcgtcgcgatcgcgatgatgctggcggtcatcggcgaaacggtttcgccggtctcgcgcagcgtgctcgaatagctctgcgaaaacgcgaacggcacgaggccgaacagcatcacgagcagatagctcttcgcctcggagagcgtcagcgcgaggtcgccgccggagccgtcgtcggtgagaaacaggccgatcagcggctcgccgaaaacggcgagcgccgcgatggcgagcaccgtcatcagcatgctgaagatgatcttgaagcggaaggcggcgcgcacgccgtggtggtcgcccttgccgaagaactgcgcgccgaagatggaggcgccggcaaggccgccgaagatcgtcaggttgaatacgaacagaagctggttgacgatcgcgacgccggacatcgattccgtgcccagccggccgaccatcacgttgtcgagcaggctgacaaagctcgtgatgccctgctggatgatcatcggaatgacgaggatcagaaggtcgtggtaaaacgcgcggtcgccgataaaggtttccttgaatttcttgaacatgattttcctccccaaaatgatcgtgctttaaaaagccggactatcggtcctcgggcggcagaagctcgccgagcaaggcggtgtagtccgaaatacagcggtcgcacagcgcgagaaactctgcacgctcctcagcggtctgggccgggtcgagcacgccgaccacggagaagccggcctttttcgcggtgcgcaccgcatagagcgcatcctcgaaaacgacgcattccgcgggagaagcgccaaaatccgccgcgcatttcaaataaatatccggcgattccttgcttttgccgacggtcgtgcagctttccgccgcctcgatgcccggggcgatcgaaaggcgctcgagcgcgggccagagcgttttgagatccgaggccgtggcgacggccgtgtggatgccgcgggcccggagcgccgccgcaaattccgccgcgccggggatctccggcacagccgtgcggtacttttcccgcgccatttcgacgatttccgccgtgatcgcagaaagcgtgccgggcacgccgagcacgtcccggtaataggccgcgcactgctcgaggcacatcgcgttaagcgttttgctcagccccggcggggcataaacgccctttaaggccgcgtattcgtatgtaatgctgttccacatcggcatgctgtccaccagcgtgccgtccgcgtcgaagatgaccgcgcggattttgtgcggtataccgggaattgactgtatcataagagcgcaccgtcctttgtctgcggcgcggcatggccgccgcgccgtccgcataaaaacacaaaaaaataaaaggcccgcattgtgtgacgtttaacctttactatatcacacagacgggcctttttcaaggctttatacggtgctggacgctccgttttttacatggcgccgagcgcctccttgatggcgtcgataccgcgctggatctccttgccgaaggcctcggcaaagccctcggaactcgtgctatcgtcgatgtcgccgagcagcacaaagaacacatagtcgccctcgctgtagatctccgcggcgtcgatcttatcggtgttcgcggcaaaggcgttgtcgctgagcaggcgctgcttgtaggccgtcagcttctccttcacctcatcgaccttgcccgctttggcctttacggcgatgaaggtatccgggtgcgccttttcggccgtattttccgcgtaaacctcctcgtaaagcgtgtcgtccagaccgagttcctcgcggatctcgtcctcggtcagcttcgtatcggggtagtatttatcgccgtacacgccgtgcagcgcttcgcggaacgcgccgagcccgtcggccgcttccgttttctccggtgcggcggagctctcaggctttgcggaggcctcggctttcgaggaggcggaggcgtccttcgaggcttccggagaagcggaggcattctcctttgcgtcggaggcggcgctggaaatcgtggaggaaaccgaggagctggtgttcggcttgctctggcagccggcgaatgacccggccagcaggactgcgagcaaagccggcacaatttttttcaacatgatgaatcgatcctttctctgtatctcggcgtagagccggtctcaaaaaacgcgcggacagcccgccgtttgccattactatgccacggaatttttaaaataaacgagagcggcgaaaaatagcgcgccgaaagcgccggagcataccgcggcgcgcaccggttttcgttgaaaaaacggccggcatgtagtatactaaattctataatatgctttttagggggcgtgcggcatggcgaggcggagcgggtatcggtcacggcgtttttgtttccgcttctgtcggtcttgtattttgaagcggttttttcgtattttgcgcaggcggagatgacggtatacaaggttttgtttgcgctttccgccggcgcgctggcgctcgcgctttcgcggctcacgccgttccgcgttctgaatttcattttgcagacggcgtggctccttttctgcggcgggctcactgccgcgcagtttttgtgttttcgggcttccggcgcgtatatttcgctctttggcggcggcgcgcgtccggcgggcggcgctcttttctccgccgcgctcgagagcctgccgtttctcgcctgcctgctgctgccgctcgccgtgcagctcactttgcagcgcggcgcgcttctgcaccgcggcagcctgccgggccgcctgctcggtgcagactggctcgagccgatcggcgcgctgctgctcgcggtgatcctcgctttcgtttcggtcacgctcgcgttttacgatgcggacggcgaggcctcgccgcggcatcagctcgagatcgagctgatgccggaggcgtcggtggagacgttcggcgtcgtgcccgaggccgcgctcgatttcaaatacagcgtgctgcgcctgcacggcgaggaggtcgtgcgccggtacgtcgtcgcggaggacggcacgagaagcgcgctttcagaggaatgaattttcggattctattaaaaaaacttgaatttcctgcggaagttcttgacacatatcccaaaaagaaagtacaatgacagtgtagccgcgccgcgcagacgggcgccggtacggcggctgcaaatacccagaaagaaacgggaagatttatgaacgcagaaaagagaaacaagcagaaagctgcggggaagggcggtgcttcaaacggaacatccaaacgggaatccgaacggcggaggtaaaacgccgatcgagcgcgaattcgagcagtcgcagacgtacaaggtgatccaaaatgtcggcgacaaggtggtgcacgggctgaatcaggccggcatcacaggcgacaaggtctcgcgcggcatcaacgaagcggcgaaggagctgaaccgcgccatcggctcgctgaaccgcagctttaacgggcgcgccgcacagaacggggcgtaccgcgcgcccgggcaggtgccgccgcagggcccgcagcaaaacgcacaggcgcggcgcacgggcggctatgcgcagccgggcccctacgcgcaggcgcagccgaatccggcgcagggcggcaggccgcagggctatgcgtatgcgccgccgcaggccaaagcgcaggcgcacacggcataccggccgccgcgcccggtgccgccgcccgtgcgcccgggcatgatcgagaagcggcagccctcaaacgcgaagttctggctggtcggcgtgctgtgcatgctgtacgccttcacgatgccgatgtacgactggatccacctcgcgccgctcgcggcggtcggcatcggcggctttttcctcggccgcctgatcttcaagggcaagcggtattatgtgccggtgcaggcggaaaagccgaaggaggagaaaaagaccgagccggagcccgtgcgcaaatcgacgaccggcaatcccgaggttgacaggatcatcgacgagggcagcgtctatctgaagcagctccgcgaggcggacgaccgcatcccggacgaggtgatgagcgcgcggatcacccgcatggagaccgcctcctccgatattttcgcctatatcgcggaaaacccggagaaggcgccgcagatccgccggtttatgaactactacctgcctacgacgatccggctgctcgcaagctacgacaagctgagccgccagcgcgtgaagggcgagaacattcaaaagacgatgtttgaaatcgagggcatgatggagacgattgcggccgcgtttgaaaagcagctcgacagccttttcggcgacgacgcgatggacatcgccgccgatatcagcgtgatggagtccattttgaagcaggaggggctttccgacgacgaggacgacacgatccccgcggtgaaaacggcggcgcagggcggcagggcggtacagacgcaggcggcccccggccccggcatgccggcgctgacgctcgaccccgatgcggcggagaacggcgggaaaaagccgtgatatattgaaggaggaaaacgaaaatgagcgaattgaaactgacgctggagccggagctcgaatcgccgtctctgggcggcgtgcctacgctgacgctcgacagcgccgaggcggagaagaaaccggagccggaggtgcccgaggagccggtgctttccccggaggaacagaaggttgtcgatgatttcgtcgagaaaatcgatatcacaagttcgtcgcttgtcatgcagtacggcgcgggcgcccagaagaagatcgcgaatttttccgatacggcgctgcagaacgtgcgcacgaaggatctcggcgaggtgggcgacgaaatctccgacctcgtcgttgagctgcgcggcttcgatgtgagcgaggaggaggaaaagggctttttcggcttcttcaaaaagcaggcgaataagctggacggcctcaaggcgcgctacgacaaggccgaggtcaacgtgaacaagatcgcgagctcgctcgagggccatcaggtgcagctgatgaaggacatcgtcatgctcgacaagctctatgagatgaatctgaactaccacaaggagctttcgatgtacatcatcgcgggcaagaagcggctcaagcgcgagcgtgagacgacgctcgtcgagctcaagaataaggcgctgcgctcgggccttgccgaggacgcgcaggccgcgaacgacttcgcgcagcagtgcgacagctttgaaaagaagctgcacgacctcgagctgacccgcatggtttcggtgcagatgtcgccgcagatccgccttgtgcagaacaacgaccgcctgatggcggaaaagatccagtccaccatcgtcaacacgatcccgctctggaagagccagatggtgctggcgctcggcgtcgcgcattcggcggacgcggtgcgcgcccagcgcgaggtgacggacatgacgaacatgctgctcaaaaagaacgcggaaaagctcaagatgagcacgatcgaaacggcgcgcgagtccgagcgcggcatcgtcgatatggagacgctgcgccagacgaaccagtcgctgatcacgacgctcgacgaggtcgtgaagattcaggaggagggcaaagtgcgccgccgcgaggcggagcaggagctcggtcgcctcgagggcgagctgaagcagaagctgctcgacatccgcgcataagagaaaagctgtgcggccggcggtttcgccggccgcttgcagattatgctgtgaaaacggaaaggtgattcgtgtgaaaaatgcttttttacacacgatttgtgcctttgcttcgacaagcaaatttgccgcggcgagcaaagcggcaatcggcttcgccgaccggcacaaaaataaggaaaggtgatttttatggaaaagaaaaacagggttcgggggcgtgcggcggcgattatcggcatgatcgtgctgatcaccgtctccattccggtcggctcgtgcatatcgcttgcgcgcgagcgcggcagtgcggcagagctgtattacggctccgacgacgagtggggtcttttggaggatctctcctggtgcagcaccgaggcggcgaatctcgcgacgcttgcgggaaagtatctgccgcaggacgatgagcggatcgccgatgtgcagcgggcgcgcgaggagatgggcaaggccgaaaagcccggcgacaaggccgcggcgttctcgcgcctgaccgcgaaggtgaacgcgctgggaaacgcgcttgaggcggccggtttgccggaggaggacgaaacgtaccgcaaggagatcctcgcggattacaactcggacgccgactttatcaaccgcagcgattacaacacggaggcggcgcggttcaatgagatcctgcgctccacgccggcccgcgggctggcggagctggtgggcatcgagccgctcgagctgtttcagtgagaattttgtacggaaggaaaggaattgccatgacaaagcaacgtgtcctgcgccgcgcgggcgggcttctcctaatgtgcgtgctgctggttgtgctcgcggtgccggcgctggcgagcgggattccaacggcgccggattccttcgtctatgacgaggcggacgtgctctcgagcgcgaccgagcagtatatcaacatggagaccgccgcgctcgatacggcctgcggcgggcagatcgcggttgtcgcggtcgattttaccggcgaatacagcacggcggactatgcctacgagcttttcaacagctggggcatcggcgacaaaaacaaaaataacggcctgcttctgctgctggtaatcggcgcggaggattactacattctgccgggcgagggcgtgacggatattttctccggcggcacgctgcaaacgctgatggacgattacctcgaggccgattttgcaagcggcgactacgacgcgggcgtgcgcaagacgtttgaccggatcctcgagatctacggtgaaaaatacgaccttgcgcagagcggcgccgccgtgccggacgccgggtactccggctacgatacggcgcgcgatgcgggcggctcgttcttctcgggcttcttccgcctgatcggcaagatcttgattatagcgatcgccgtcgtgctcgtcatcgtggtcgtaagcctgatttcgggcggcccgcgcggcggtggcggaggcggcacaggcggcggtggcggcggaggcttctggaacgggcttctgctcggctcgcttttgaaccgcaggcgctacacctaccgcccgcccccgcccccgttcggcggcccgcggcctccacgcccgccgcgccggaatccccccggggggttcggcggtttcggcggcggctccggcggttttggcggcttcggcggcggccggaccggtggtttcggcggctttggcggcggatcgtcgcgcggaggaggtgcagggcgccgatgagcgcgtggattttattcgatttggacggcacgctgaccgacagcggcgagggcgtgatgaagagcgtgcgctatgcgctcgaccgcatgggctttccggatgagccggaaagcgcgctgcgccggttcatcggcccgccactgcacaaatccttcatggatttttacggcttctcggaggaaaaggcgttcgaggccgtggaaacgatgcgcgtgcgctaccgggagaagggcgtgtatgaaaaccacatgctgcccggcatgaaggcgatgctgcaaaagctgtatgagcgcggggtgcggctttgcgtcgcgacttcgaagccggtgtttttcaccgagaagattttgcatcagcacgggctggaggggctgttcacgcatgtggtcggtgcgaatatggacggcacgatgaccgataaaaccgaggtgatcacagaggcgctgcggcgcatcggcggcgcgcagggcgagcgggtctttatggtcggcgaccggaaattcgacatgatcggcgcgaaaaactgcggcgttccgggcatcggcgtgtatttcggctacgccgagccgggcgagttggaagcagccggcgcgcagtacatcgcgcgggacgttccggcgctcgagcggattttgctcgggctgtgcgaaaaataacagaaggggctgcgcggtttaaagcgaaccgcacagcccctttcatatgtccgcatttgcgccgcgttatcctgcgcggtaggttacaaaaaggtgcctgcgttataaaaaagtgcgtacttgtgcgggcggcctgcccggcgctataataaggccaacacaaaagcacagggggaagctgctatgaacgaaatgattcaaaaaatctgtacgcgccatgcaatccgccggtttgaggaccggcagctcgaggaaagcacgctggaagagattctcaccgctgggctctacgcgccgagcgcgggcaacaaccagcagtcgcgcatcgtggtctgtcagaacccggaagtcaacgcggagctcgggaaaatcagccgttacatgcagtttaagggcggcgacccgaaaaagatgtcgcatgcaatttcggcggagcagccgagcattcaggatgaccacacgattctgaacggcttctacgacgcgccgaccgtgctcacaatctttgcgcggccgggacagtacgcgcacgacgacgcggcgatgatcgccgaaaacattctgctcgccgcacacttcctcggcgtgggcggttgctatatcgggcgcagcgaggaagtttttgctacgccgtacgggcgctcggtccgcgaaaaatggggtgtgcccgaaacgctcacggccgtctgcaacgtggtgctgggctaccgtgccggaccggcgccgaaagaaaagccgcggcgggaggggcgcattatccgcgcataacggctgagggctgcatccgtttgggtgcagccctctccgtctatgcaggatgtgcgtcaaaaaacgccttgttgtgcgcgtaggccttgctctccggcttcagctttccggcgcgctcgttgcatgcgatcgccttctgcgtgtcgccgaggcggtaccagcagacgcagagctggatcagcggcgtgtagccgcagctgtccggctcgtggaagccgccgtcggtttccgccgggacggcctccagcgcgcgcgtgtaccagaacgccgccgttttgaaatcgccgtgctcgaagaaaaagccgccgaggtcgcagcacagctcggcgcggggcggcccgaagcgcagcgcgcgcgtgagcgcggcaaacgccttttccggctcgttcagccgcagataggcgcggtagaggttccggcaggcctcgaggctgttctcgatccagccgcggccctcgtcgagaaagcgctcgaaagcggcggcggcctcgcggtcgcgcccgtggtacgtcagctcgcgcgcgtagtagaactgctcgcgcggggcgagcgtttttccggcggcgagaagcccctcgaaaatgcgcaggttccggtcgggatcgcccgggccgagtttgcggtggctgaccgcggcgtcgccgtacacgatcttgcccgccggcgcgattgcctcatgcacggccccctgccatcggaagcccgccgcccgccgcagaaggcgctcgcgccagtaggtgaaggtcggcttgccgcttgaatcgaagccggtgtggtagcgcagcatcacaacgtccgtatccggggaaagcgtttccttgagcgtttgaaaggccgcccggtcggcgggctcgagcacgtcgtccgcatccagccacatgcagtactgcatcgtggcctgcgagaaagcaaagttgcgcgccgcggcgaagtcgtcgcaccacgggaatgtgaggactgctgcgccgcagtcctcggcgatttccacggtgcggtcggtgctgcccgtatcgacgacgatgacctcgtccattaggccgcgtacggaatcgagacagcggcgcagcgtccgctcctcgtttttcacgatcatgcaaagactgactgtaatcatgcgttacgttgcgataacgcccgccgtgcgcagcgaggcgagcaggctgttgaaggctgtgatgacctcggagagctgtgccgaggtggcgagatccgccacggccgggccgggtgtgacggcagggcctgccgggccggtatcgccggttgcgccggtcgggccagtcggaccggtctcgcccgtggggcccgtcgcacctgttggacctgtgtcgcccgtggggccagccgggccagccgcgcccgtgtcgccggtcggacctgtttcaccggttgcgccggtatcgccggtcgggccggtcggccccgtctcacctgtcgggccggtctcgcctgtgggacctgtcgggccggtttcacccgtggggcccgtcgcgccggccgcgcctgtgtcgcccgtggggccggtgatgctcgcgcccgcggggcctgtcgcacccgtgtcgccggttgcacccgtcgggccagtcgggccagtcgggccagtcgggccagtcgggccagtcgcacccgttgcaccggtcgcaccggtatcgccggtcgggcccgccgcggagagcagcgtgaaatcggcggagctgccgggtgtgccggatgcgccgtttctggcggcgcggtaaaggctgtcgttgtagtagacgatatcgccctcattgtagaacgtgccgagggcaaaggcggtggcgtcgctgagccccgggcccggctcgccggtcgggccggtgggacccgcagggccagtagagccgtgtatttatgcacaacattagattttcctttgtgttgagtaggcaagccgttagattgccttgttctcaatcactcggataacgttgtggttattctcaatgtaatcaataattcgctggtactcgtcggcaaaattgaagtcaaccgttatttccccgttctcatgcacccaaaccgcttttacgagttcaaccataatcccgcggttaaggctctgaatgtttttgtatttcagaaaggcggttagatacgggtcgtcggttccgataccatcagccattacctgcatttcctctttcagataggagatgttcgcttcaagctgttgtatctgttctgcaatcttgcctttcaagcggcgatattcctctttggtaatctcaccgcttttccaatcaaggtacaagctgtcggaagcgtcattgtactgttttagctgcttttctgcctgtttcaaggaatgggataatctcttgctttcccggttgataacaggcgcgttgttaatccgttcaatttcttctgcaagccgatctacaagggcaatttgcatttgcaacgctgccaataccgcgttttccaacttgtcttgccggatagaatgtttgctgcaaatcttcttatcggtgtagctacggcaagagtagtaggcaatatcacgggcggttttgcgccgcatggcctttttgcaatccgcgcaacggacaaagccggacatgagatagacttcctgtttgccgggggctgtccttgtgtcgcgcttatgtagggcttgcgctttctcgaatgtttccctgtcaataatcgcttcgtgtgtgttggggacgacaaaccattcttcttcggggacgttgatctgcttgtgtactttgtagcttattacgcggttacggccttgcaccattacgcccgtataaacttcattttgcaatatccttgcaatcgtgctggcagaccacaaaccatcgtttttgtcggaattagggttgttatacttaaagccttttttcttcttataggcttcggggttcggctctcccatttggttaagccgctttgcaatccccattttactgtacccctcattgacaaaccaatggtaaatgcttttgacaacttccgctgcttcttcatctacaatcaagctgtttttgtcgtttgggtctttcttgtagccataaggggcaaacgcgcctatgaactcgccgcgctcccgtttcatcttgaatgttttgcggatttcttcggaagtggtcgcggcaaactgctcattgaacattcccctaataggtacttcaagaccgcttgcagaatgggggttagcgtaagtgtcaataaatggcgtgcctgtgcaaataaaccttgcgccgtgaatgggtatgaactcctccaaaaacttttgttgatcggcaaggttgcggaaaccgcgtgcaagggatttgataatcatgcagtttacttctttgcggacaatgcagccctcaagccgtttgaagtttggtcgcgctgtgtcggtgcctgtcaatccgtcgtcggcaaacacgtctacaatcacataggttcccggctcaaaatagctgtctacaaagtcgcggagtatcttttcttggttgataacactctcgctttcgtcctcgttgtcgtcctctctggatagtcgaatgtatagcccaattttccaaaacggctctgcataactgcgtgccattttgtctttgcgtatgcggggcattatacctcctttccccctataattacgagttaattataccattttcgccccgtaatcacaaggtctttacccgtagagttagggaaagtcggcggttatttcagacttaaaaagtaatcacacaatgattgctttagcgttctatcctctgcgacaaaccgtattcttacgggtgtatcaccacaaagaaaacagtatggatttacaatctgctcaaagtagctttgcattttctttgctgctggcaaagaactgtcaatatggatattacgaatatcaaccaaagtgctgcggtcaacctgtgtaatatcaacatttctcatttgttgaagttgtaacttggtaatcatcttctttccctcccggttagcggcatagtacagaatatgcgctccggcttgtacgatatgagaaataaggctgaaacgggcggttgttagctgcaacctcacgggagtttcaccccggcccatgcttatgggtgcgccgcgcaatactttgagggtgttcaacgcgggagtatcattgtgccgccttgtatgtcgtcgcccacaagctgctaaacctgttttacggcgcggtagttgtcgctcgacttttccccgtaggggaaaagctgtcatggcgtacccgccgactggctcgatacagacggaatgtacccgttgcctgttatgctgcgcaccaaaggtcgctttctttgtcaagttacaataggctttgtcggcctgcaaaagcacatcaacagcggatatgcttttgcggaacgacaaatagcccataacgggaatcgtggaaaggggacacgctccccgcatgggctaaaagattatcctacatgaaaagcaagggtgcgggtaataaggcgcacttgcagcctgttacgcatttcctcgtccacataggaataggtattgcccgcgtcgtctttcagcgtgcgggtacaaagtttcgctatgtaaccctcgtaatgcttcaagatcgcgcacatggcggttgtgtcgccgtttgccgctgcggaaatgacagggaacggcaacagattttcagatttcctaacggtattcatcatctgcttttccctccaaatactgtttgattttcgcaagcgcggatttcctgtgccggaaaaccgtcgtgcgtacaacattcagcagttcgccaatttccgcgtcgctcatatccaagaagtaggacaaaaggataatgtcgcgtttcctttcgggcaaagcgttaagggcttcggcaagcagttcatttttgacgagtacatcaaagccggacacttgaaaacggaaataatcgctttcgtattcgtccgttgtgaaaagctgcgcgagttcgctttcgctcaaatccgaaaaagtaacttcgcgtgctgcgcgtttcgcaagagtgcggcggtggcttttcgcttcgccgaccaaagttttctttgctaatgcgtcgtactgatgttgtattctttccttgtcggaagaagatagctccatagagttcacctccttcccgcgtggagtagaggacgggagttaagggcttgtcctctctgcccctttcgctccgtacccgttcgggagatggctcttgagtgcgcttttcagaaaaaagttgaaaaaagcaaaatgcgcccgtccgcaagacgcggacgggcgcaaaggaaatgtaagcagtagctaaatgtattgacagttcacattcatagccggaatatcccgcttgcggagcatagctttttttgaccgcaaagcattaggcgggttacagtaaataaaaatggacacggcgatacctccccgataccgccgtatccttaaaaaagggcgactttaatacactacccgcaatccattctataatagggaacagcggcttttgcgcaatattaaataaaaaagccgataacacataggttttttgacctaatgcgttatcggctctgcgtctatgcgtctggcacttttaatcatttttttttgaatttattatatgtgttagctaactgtccacaagccgcgttaatctctctgccatgagaaactctcatagtaacttcaagtcctgcttgctctaattgatgtttgaatgcaactatttcccgtttctgtggtgctttaattcttgaattgcttgttgggttgtattgtaacacgttaatcataacttttttgccccgaaaccattttgcaagttgtcttacatctgagggccggtcatttatacccggtaaaagcaaatacgcaaagacaattttgcgattatgcctttcagaataggataaggcttgcttaacaacatcttcaatagcatatatgcgcatgtgaggaataatacgatttcttgcagattgtgttgctgcgtgtaaagatattgtcaactgaattttaagatgttcctcgcgcaatttttttaattgatcgaccggaccaactgttgatatggtaatgccgtcggttggaaagttgagcccatatctatctcggagaatatggattgcttttatcaagttgtcataattgaataaaggctctcccatacccataaaaacgatacggtttacttttcgacgcaacaatataatctgttgtacgatttctgacgatgttagattacgaacaaagccatttcgcccggactcacaaaaaatacaaccaacaggacaaccgacttgtgtgctcacgcaaacagttccaccatctcgccgcttgataaaaaccgtttcaatgtatttgttgtctttcagttcgtaaacatacttttcagtatcactgcttttgcaaatattttttaccaacattgatagattttttttgcgtggtaattgcttatataattcttcatataaggcttttgcttcattctcgccaataacttccgacatttctttgtaagtaaatccgtatggatcattccgtacttccgcaggcgtatatttaggtaaacgtttcatttttatatcctttcttctaaataataaaagtttgtttttctgtatttttgattacaatctctaatttttctacatcaatgatatgcgtcaatttgcatttagggcagaaaagaggaaaatcttttaatacagtattatgaaatacttgaactctcgtctttccgttacaaatcggacattttatccaatattttttaagcattatatttcactcgtcctttttacacaaaaaaatgcaggtcaatcctcaacatgagcattgacctgcatttataatgcacagagcagtacaacaaaactaaggcatagcttgcactatgtctatactatatctatacgtcgttagttttttgtatagcatccgcaaaataagcatgacaaaaaagcccatgttgaaaatgggaaaatcctttttttcaatgcttatctaatacgcatgctatgcaacataaacgccgcctccttttacataaattttattttatcagaaaatcagtctactgtcaatacacaacaggaagtatttaacctaatgatatgaattgtgtggacatatccaaaaagaaaggtgaactgtaaaatgtaacagggtgaatgaaaatggcaaaaagacccgtaccattgtacgactttaaggctttcggggcagctataaaagccgcgagaaatgaatacggcgagagccgcaaaaaggtaagcgacgagttatatatttccccgcgctaccttgcgaatatcgagaacaagggacaacagccgagtttacaggtattctatgaccttgtaacccggtatcatatttcggtagatcaatttttcttcccgaacagcaatgcggagaaatccaccgggcggcggcagcttgacgcgctgctggacggtatgagcgataaaggcatacggattgtaaccgcaacagcaagggagataacggaagtcgaaaaagcagaggattaacctcacaatatgagaaatcgggagattgcagcgcatggcggctgcaatctttttttgcgtccaaaatcaaaggaacgcgcaacaaataccgcctttcggtgggggtatggagtagatagcaagcacagcaaacgagtacccgtttgcgaaaaatgctttttgggataatcccaaacccttataccgaaaggcggcgcggaaatggaaaaccgaaagagaaatatccaaatgaagttttacgttacggaagaagaaaagcggctgatcgacgagaagatgaagcagcttcccataaagcagtacggggcatatctgcgcaaaatggcgattgacgggtatatccttgtcattgaccgaagcgacacgaaagcatatatccgggaactgcaagcggtgagccggaacatcaaccaaattgccaaacgcgccaacgcgacgggggcggtttaccagcaggacattgaggatataaaaaaggcggtggacgagatatggcggttacaaagacgcaccctattaaatcaaccttaaaggccgcaatagactatatcttaaatcccgaaaagacggacgggaaactgcttgcgtcctctttcggctgcgggctggaaaccgccgatatagagtttgcatggacgcgggaagctgccggagatcgcggcacccatttagggcggcacttgatacaatcctttgcggtgggagaaaccacgccggaagaagcgcacaaaatcggcatggaacttgcgcaagcggtgttaggcggcaagtatgagtttgttttgacaacccacgtcgataaagaccatctgcataatcacttgattttcaatgcggttagcttcgttgactacaaaaagtaccattccaacaaacaaagctatcattttatccggcgcaccagcgacaggatatgtaaagagcatgggctatccgtcgtcgtaccgggacaggacaaagggaaaagctatgcggaatatgccgccgaaaaacaagggacaagttacaaagccaagctgaaaacggcgatagataccctcattccccaagtcaaagattttgacgaactgctgcaccgcttgcaggaaatggggtatgaaatcaaacagggcaaatatatttctttccgcgctgccggacaggaacggtttacccgcgcaaagacgctcggcgcggcctatacggaagaagcgataaaggaacgtatcaagggcgtatatatcgccaagtcaaaaccgctgcgggaagataagaaaatccggcttgtcgtcgatcttgaaaacagtatcaaagcgcaacagtcggcgggctatgaacggtgggcgaaaatccataatctgaaacaggctgcaaaaagcatgaacttcttgaccgaaaacaagattgaatattacagcgaccttgaaagcaaaatcgcggatattatgaccgcccatgacgcggcggcaagggcggttaaggacgtagagcagcgtatgtctgatttgtcgctgcttatcaagcacacaaccacataccgacaattaaaaccgatttacgaggaatacaaaaagtcgcgggacaaggaaaagtatctgcgggggcatgaaagcgaaattatcctgtttgaagctgcggcaagggcattaaaggaaatgcagataaagaagctgcccgatctcgccgcgctgcgtaaggagtatagcagcttaaacgacaggaaaagcaaattgtatgaggattaccgccaagcgaaaaagcaaatgcaggagtacggcattgtcaaaaagaacgtcgatagtattctttacccgtcccaaagcaagacgcgggagcaggaacgataagaggttacagtagaaaaagtcataattttattgtaaaatagaattgcctggaaaggagtatcgcaaatggataacgacaaattgcagctttttgaaaacaaagcaatcagaacggcatgggacgaggaaaaggaagaatggtacttttccattgttgatgttgtcgcggttttgaccgacagccccaaccctcaaacctactggcgcgtaatgaaaaaacgcttaaaagacgagggaaatgaaaccgttacaaactgtaacgctttgaaaatgaccgctgccgatgggaaaaagcggttgaccgacgttgcgacaacggaacagcttttgcgtatcattcagtctatcccctcaccgaaagcagagccgtttaagctgtggcttgcggaagtcgggcgggaacggatagaagaaaccatagacccggaacaggccattgatcgcgcccttgaaacctatctgaaaaagggatatacccgcgaatggattaaccagcggttacaggcaatccaagtgcggaaagaattaaccgacgaatggcaagaccggggcgtgaaaaaggacgttgaatatgcgatactcaccgacgagatcacccgcgcatggtcgggaatgacgacgcggcaatacaaaaagctgaaaggcttaaaaaaagaaaatctgcgggataacatgagtacaacggaaatcatcttaaatatgctcgcggaaacctctacaaaagatatttcccaagcgtccaagccggaaacctttgaagaaaacatagaggttgcccgtcgcggcgggaatgtcgccgggattgcaaaacaagcccttgaagcggaaacgggcaagcccgttatcacttcccaaaacgcggcgcaattaaacgccgttgtaacgggcatgattgagggcgttgtggacgcggaaaagaagaaagacgaaacggacgaataaaggggtaacaagtggaacgttaagggctgaaaacgcctgtgtttctgcggcttccagcgcggggaaacggcgtagacgatactttatattcaaacccgcaaaaacggctttctaattgtccacgcaaggacaaaaaaagaacaggggcgcggtgccggaagtcggaaaccgcgcccctgttttctatgggctattcctcgtcggtcaagataaactcccgttcggaaaactcgctgtccgtcatggcttgcagctttttcaccgctgcggcggcaagctggcacatatcctcgtccatgtagggcatggcggcaaggatattttcaagcgttgtttcccggctgtcctcggcgtagatcgcaacaatgttttcttcctcaatggtaaagcgggtattcatgctatcaaacctccaaatcctttttatgctctttctgcttatctttcggctgctgcgccgcctgtttcttgtactcgtccagcttcttcaaaatggacggttttttctgcggctgttcccgtttctcggcttttaccgctttcgcaaggtcggtaacggaaatcgtttcgcccgcctttgcccgctgctcaaaatctgcgacggtgggcgtttgcggcatgttgttgataagcccgtcaaaattgttgtcgttttgctctatggtgtcctcgacgtgctttaagggattatcccgttgcggctgctcggctgctatggcaaacgcctgtgtgccgtttcccataatgagatacttcccgtcctccgacgcatggtgaaaaccaaagcccgccgcttcgatctgttcgcgggtcatatcggtaatatgaaaattgcccctcggcgttctaaccgtttcacccgtcataaggctttcgggggtcgcttccggctgctgcttttcaagctgcccgtccttgtagaaatagccttgcgccgcgattgcttcaagggtcttgcccgtaacgtcgccataaatccgcttgtctgcgtcaaccaggatttgcagagtgtcttttaccgtgtcggacaaggcttgctgctgttcgggcggcagcttgtcaaataccggggtctgctgctcctgctcggcttgccgctgttgctgcaactcggtaaaatgcccctcaatctcggtaatgagttcctttgcggtagtctgtatcgtttcaagggacgcttttaactcggtcatttcctttccgctgctccaacccgccacatagccgaaagagtaatcggaagtatcaaggccaaagtgctggcagacggtataagcgacgctttccgcttgtacctcgcgggtatggcgtggggcgcggttttgttcctccggcggggcgtttaagtctacatcgtgcagcttcgcatgggcgatttcgtgaatggcggtctttaccgcctgtaactcgctcacaccctccttgattgcaatacgcttgtcggtcaaactgaaatacccgtttgcgctgccgccgatctgctcaaaggcaatcgggacgggggacgctttttcaagggcggcgaaaaaatcctcgtactgctccacatcggcaagcagcggcttaacggaaaggtcggggaactccttgccctcggtctgtgaaatatcaaagacagttataaccttaaaggcggggacggtgatttccttttcttccttaatcggctttccctcgcggtcaagcatgggctttctcgtttcggggtcgattttgtcaaccagctttttcaccttgtagggggcgggggcaaagattttaatgcctttctcgcctttctttacatggcggtcaaactccttttcccattgacggaagcccattactaaattgccgccctgcatagcaattaggatagtgttattcaaactataatcatggaacttcgacatagcggttagaaactctttgtagcggtcgctgtcaaaaatcgcttgtacgccctgttccaaacgggcggtgatctcctttaccttttcggcgggcttttcggaagtaaggataatggggacgacggggcggggctgctgcggctctgcggcctgtgtgtctgcttgctgcgtttcggctgcgtccatataggctttgtcctgttcgccgcgctccggctgcgggtaactcataatcttgtattcctccggcactttgcgcccctcaaactgccgttcccactcgtcgccgctttccacgatatagccgtattcggtaaacgcgcctttttcctgcgcggcggcgttcctgccaaaagtagtaaggtcaatgccgcctttccattcttcgggcatttgtaccatgccggattgatttaagtaatagtcgcccaaatcgcggtaggtatgtacttcggggatatggacgtaaaaatccacgttgtaggtgaagtcaattacctgtccaatatttgcaagcccgtttttttgctgcaaagctgcgttcagtttgccaacctcggcggggtcaagctgttcgagccgcgccgcaagaaaattgagttcgtccacgtcggcggcgcataccatttcataaggcaaagcaatatgtttctccgggtcgtcggaatagccgcgaatggaaaaatcctgcgggttgtctgcggtaatgcctacgttccgcatagcttcgtgtaactgctcctttgtggcgggcatatccagccaatagccgcttgggtcgcccgcttcaaagcggctgcggttgcctatcataatagaaaactgttcgctcatgtgttcacgctccttttcctgcccggtattttcggggatagctgccgcctgttgctgctgcggggggtcttcgccctctatggtgtagtccggcatgagcataccgtttactttgaaatagtcggcgtactcctgcgggataggcggggagatttccgtaaacaagcggtcatacgctttgatacgcccattcagatacttttccatagccgccttatcggtgaaaacttttctgtcctgtccggcgatcttcgcttgggttctgcttgggctgttggttcgcacgctccatgtaagcgtccatgaatacgggatagatttctgcgcttctttgtcatagcgggtattctcgtaaatgtagtaattcatctgatagacccggttgctgcgggtatggcggttatactcgttttcccgccactcgttagcggtgtgctggacgtgcggcgttctcacatattcaagtgctttatccagcaaaagcgtttttcccgcctgttcttcccatgcggcggcttgctcctttaagctgtcaaaaatcgcctgttctgccgccgcgctttcgctgcgcatggaaagtagctgcgcaatcggcaaggaagcataaggggcaatatctccgtcctttgcttcaaaatatatccggcgttctatccgcatggtttcggcggcttctaatttgtcatggtcgtatgaggtgtacggcatattgtttcatcacgtcctttctcggtcatataagggtttgggactatcccaacaagcaaaatgcccgcgcttcccatagagcagcgcgggcatttctcgcaaacgggtactcgtttgctgtgcttgctatgtagttgtttttatccgtaaacgcctgtttctctcactctccgctttctgtctgcggcgtatctttgccgcgcaatcggggcagtatttcgcccggttgctgcccgccgcaaacgtgctgccgcataccgcgcaacgcttcaaatcggtttccccgctgcgggtgatctgttcgcaaagctgcctgtcggcgggtaataccgcttcgcggaaatagcggcatagcagcgaatagctgatactctgcacacaaacgcaagtttccccgtcgtccagcagcagacaatttccgcaatcgttgtttgcacaagcggcgcgggtcattttctttacagcgcggtattgtttttcatcaagcctaatcattttcggttttgctcgacgcggaagtttacatacttgccgcctgtgtcggcaagcagcacaactccgtcaaaggtctttcccgtcttggtcgagtacatacctttgatttttacctttccgtctttcaaaagggcggcggcaatcgcctttgtgaaagcctttttgcgctgctcaaaaaatcggtcattcttccacatgacaaagctgcaagccctgtcggagcagtaaaagtttttcttgccctcataaaccgccgcgccgcaacgggggcaagtgccgattgcttcccgctgcggggtaaacagcttcgctttatcctcggaaatcgcggaataggttttgacaagccccgctgtcatttcctcaatcccgcgcatgaagtcggcggggctgtcgctgccctttgcaatcccggtaaggcgcgtttcccattctgccgtaagctgcggggacgtaaggctgtcgggcaaaatggcgacaaggttatacccgtcctttgtggggattagctttttgcccttgcgctcggcaaagcccgcgctaatgagtttttcaatgatacccgcccgcgtcgcggtggtgcctaatcccttgcgctccgcgtcctccggcgtgtcctccttgcccgcgctctccatagccgaaagtaacgtatcttcggtaaatgcctttgggggctgcgtgtaacgctcggagatctccgctgcggtattttcaaagatctgtccctcggcaagcgggggcaaaaccgcttccggctctgcgtcctcgtcctgtttctcggacgcggcgcgggatagtctttcaatctcgcgccaaccctcgcaaagcgtcgtcctgccctttgcggtaaaggtatagccgccgcaagtgaaaaccgccgtaaccgcttcatactcatagggcgcggcaacggcgcaaagcagttttgcgcacacaagggtcattagctttttctcactctcggcaagggacgaaaagcccgttttcacaaactccgctgtcggcaaaatggcgtgatgatcggttactttgctgttgtcgcaaatccttgtaaggtcggcttgcagcttcacgtcctgcacaaaggggagcagagaacaaagcccggtaatgagttcctttgtgctgtcctccatatcggaagtaatgtatttgctgtcggtgcggggataggtcaaaagccgcttttcatagagtgcttgcgcatagtcaagggtttgtttcgccgtaaacccatacaaacggtttgcttcccgctgcaaagaagtaaggtcaaacaacttcggcggggctgcggtctttttctcttttttaagggaagtacaagcggcctgcgatttcttgcaagccgctttcatctgccgcgccgccgcttcgtcgtcctgcctttcggaaagggcggcaacgccgccaacgtccagccggacgacatgatatttttctttcttaaagctgctgattgcatagtcgcggtttaccagcatagcaagggtgggcgtttgcactctgccgacattcaatgttttatggtagaggatagagaaaaggcgggtcgcgttaatgccaatgagccaatcggcctttgctctgcaaagcgcggattgatagaggttgtcatagccgcgcccgtctttgagattagagaagccctcgcggattgcgcttgcttccatgctgctaatccaaaggcgggaaaagggctttttgcaattcgcctgttcatagacaaagcggaaaatgagttctccctcgcgcccgctgtcgcaagcattgacaatctcggtaacgtcgctgcggtgcataaggtctttgaggatagaaaactgctgctccttgccgctggcaacaataaactgccactcctgcgggacaatggggagatcgtcatacttccattttcggtactgctcgttgtaggtggccgcgtccgcaaggctaatcaaatgcccgatacaccacgacacaagatagccgctgccttcaaaatatccgctgcgcttttcattcgcgcccagtacggcggcaatcgccgccccgacgctcggtttttctgcaattacaagtttcatagattttcgtcctcctgctcggtctgttcggtttcgacttcttccgtttcctcgtcgtcctcgtcaaaatcaaggtcgtcaaggttgttgctgcctttcgccgcgtcctttttgggcttcaaaatcttaaagtagtagaacgcgccgccgcccgctgcggcaacaagcagcacgacaagcagaatacccatgccgccgcctttttcttcctcctgcggctgctcggtttcttccggctccggctcggcttccacgcccgcgcactcgctcatgttgacgctgcaaacggggcaagcggtgttgacgcttccgggggcgcatttatcggtgcagctacaaacgggggcttcggtctgcccgtcctccataagggcggttaaatccgcttcgtccacttggttaaggaaatggacggtgttttccccgtcctcggcgcggtcaatgatgatgtaaaaatagttgccgcttttggtaacgacggtgataaactgcttgtcgccggacgcttcccccgatatatcgtccacaagggacatattcccgtccggggtaaggggctgcggctcatagccgcccgtcgtttcttccggctcggtttccggcgcgggcgtttcctcggttacgggggtaggcgtgtcgtcgctttcatcgccgccgcccgcgtatgcggtaacagaaaagccgcacatgataaccagtgcggcaagcaaaacggtaaactttcggattagctttttattcttcattgtcgctatcctcctgttcggcggggtaggccgcttccggctgcggcaaggtgatttcgccgctggcgtaagcggaaaggaacgcggcaagctgcgtcccgtcaaggtgtaccgctttcaccatttgcacgatctgcgcgttttcttcctcgactttctgcgcttcaaggtctttcagcttcttttggtattcaaggacttttgccctcgttttctcaatatccctttcgatacggtcaagtttcgtgttcgccatagtcgtttactcctttcaaactgttttttcgtaacgatatttcatttgtggtggatagaggtctgttgcgggttttcggcttcccgtccaacgcttgccgcccgcaatcccggcacatttccaacctgcggcgcgtaggcttgcgccgttttctgtgtcaaggatataggttatcattttccgatagcccatagcccgcgccgcccgccaagctgcggcatacaacatactgcaagcgttttttgttccgtctgtgcaaaggcggttgacttcaagggtttgcccgtcgtcgagataacggctaacaggtcgtcccacaatcgcaacgcctacaagttgcccgtctgcggtgcagccgattgaaaacttatgtccggtaacgggcttatggtggcggtggtgctgtgcaacaaaggcgtttgcttccgcaagggaaacgggaataagcattagcatggcttttcctctccaaaacgctctttccatgaataattgcgccccaagccctttacagttttgagatagggcatagcgttttcttccaaagccgccgcccggtcaaatagatcgggatagtgttctttgagatataaaatctcttgtttcttcatgctcggacaaaagaaacaggacgatttacccggctgcggcaatcctgccgctttgatttcccgaatacaatcgtccctgttccagccccattcttcaatgagggggtagcggttatgatattttttgtcggcttcgttgtacttgcgggaatgttcataccgtttcacttctcccgcgtcatagccgatatagcggttgactttctcgccgcgctgccatacttcgcggcaaggtgcatagtggttgcaaaacttttcctgcggtgcgattttgtgtttctgcgaacaacgcttatgcccgtaggcaatcgacgggagcgtatgagagcgcaagcactcggtttcaagagataggcggttgccgtagcggtcaacatactgcacaacggtaatctgcggcataccgtgttccgcaagccattgattgattatctcgataaattgataggtatgcgggtgttccgcgcccgtatcggcaaaggtgataaggtcaatcgggattttgtgcttgtataggccaataagtaaggcggcactattcgtgccgccgccaaaagatacaatattcatttttcaactccttttaattgtaacttaaccgcccgtaggcgtaaaagtgggattgccaatagctggtgtccagctttgaatactggatagggtcgccacaatgcagcatgacagggcttccgtccccgtcctcgcccacataaatccccacatgggaaacgccgggggtatcgtatgtacccgtaaagaaaaccaaatcccccggctgcgggttagaaacaggggttgagatgttgtaaagcccttgcgccccaagtctgcccgtattgtataggccgctgttcgtcaacacataactcacaaagccgctgcaatcaaaagaggtttccggggtgctgccgccccacacatagggaaaaccgacgtatttatccgcttcctccatgagccgcgcaaacttttcatcggaacccagcagcgcggcggggacttcgtaatctgcgggcgggttttcatagtattttgacacatagccggattgcgggaacaaatcgggtctgtttcccagcgacgacatatacatagcgtacatggatagctgttcttcgcccatgatgtagacgggaacatgggagaggttgaagttttccaaatccacatgaagaatgtaatagttatagggtacttcaacttcgtattcgttgccctcgctgtccgtcctcgtttcggtgcggtagcgtacctgtacttcttcttcgacggtcaagatatactgtttttcaaaaagcatttcaagggtactttgcgcttcgtcaagggtaaacacgccctcatgccacgcggaaaggatagaaattagcacataggggtcatgctcgatctcgtccgcgtttacccggtattcgtcgtagccggggtattcgctttcgatattgtccagcatatcttgtaactcggcttccatagcggcatacgcgctttccgcgcccgtaatatccgcgtcctcggagagataggacgacgcaatcaagccgctgccgctgttgccgccaaagagggagcaagaggacagcccgccaaaaagcagcagcacgataaaggcaatcccgcccacaatcaagcagcctttccagtgccggacaacaaagaacgtcgcccgtttggtttcctgcgccgttttcttcgccgcctttgcggtggcttcggcggtctttttcaccttgccgcccgttttcaacgcctttgcatactgctttttaatgcgctgtttttgccaaaaacgggaaatcgggttggagtgcgcaagggcggggttatcatgcagcgccttttgatagaggaaatcggcgtttgcctttgctgcctttttctcggctgctgccgctgcccggtagggtttcagcttatggctgcgtatgccgcgttttactgcccgcgtcgtcatgccgcccgctttctcgcccacaagttctatcctgtgtccgctttccacaccgacgttttctttctccacctcatagatttttccatgtacggcggcgtccaattcctgcgccggacgggataacgggttatgacgaaatttgccgtttgggggtttatccgtcttttcaaaagcaaggcgtgtctttgctttgcctttggcttcgtcaaaaacgcgctcttttgtgattttggtctgtttggggatagctgcccgcgctttgtctaaacggtcagccgccgtatcggattttttgattgccttttgcagttccggagttgcccgttccgcttcggaaaactgtaaacgggacgtatgggttttaagctgcgctgcgtcaaggctctttttctccgcgcccttttctaaatggcggctaacctctgtgctgatacgttgggtcgctttttccgctgctcccgctgcgggggctgaatagttttcctccggcggtctttcgctgatactcgtcgtttcgcccgtcgtaaggttttccgcaatcgccccgtcgcgggtcattttctgcgttaccttgtcgggggcttttaattccttgctcaatgttcatcacctccaatacgctgttttgcaagggtgcagtattcggggttgatctctataccgatatagcggcgggaaaggctttttgccgccgctgcggtcgtgccgctgcctaaaaacgggtcaagcacaatcccgcccacgggacagcccgccaaaatgcacgtttccgcaagtttgggcgggtatgccgcgaaatgcccgccatgatacgcgacattgttgatctgccaaacgttgcggcggctgcggacgggggaaatcatctcgtcggcgtatgcgcccttttcgcgggggcggttgattttctgcggctggttctgccccggaacagtaacggcatatttgttacctttgccaacgccgcttttcagccgctccgccgttgcgggggctatcggctcggctactgcttgccaatcgtagtaatatttcttcgtcttggtgagcagaaacacatactcatagcagcgtgccggacggtctttgcagctttccggcatagggtttgttttgtaccagataatagaactgcgcaaataccaaccgtcgccccgcaaggcaagggctacaagccacggaacaccgattaagtctttcggcttgcagccgggggcgcggtggttgaccgccacttgctgcccgttcctgcctttgggatatttggggtcttggtggccggctttgctgcctgtgccgcaataagtgtccgcgatattcagccaacaagtaccctccggcgtaagcacccgctttacctcatggaaaaccgccgtaatgcgggaaacgtattcttccggcgtcgcttcccgcccgatctgcccgtctgcgccgtagtcccgcaaggcatagtagggcggggacgttacgcaacaatcaactgcgttttccggcaaggtttgaagcacctgcaagctgtcgccgcaatagattttgtccgtttctatcctcatgccgacacctcgccgggtttggtcgtcatgacgcggtacagttccgtatcctgcgggaaacggtcaataaagggcaaaatcacgttgccgtagaaaataagcccctcgcccgcgtcggaatgggttacataggtcatttgctgctgcgaaatgttaagctgctttgcaaggatttccctgtcgccctgtgcttggttgagcatatacacaaaatccgagttttcaaagatgttctccacctcgcgggacgacaacaaatctttcacgttttgggtgatacctgtcggaataccgccccactttctaaaacgcttccaaatctcaacgctgtacgctgcggtctgttcctctttgagcagcaaatgaaactcgtcgatatagtaccgcgtcgccttgccctcgctgcggtttatggtaactctgttccaaacttggtcttggacaatgagcataccgagttttcgtagctgggtgccgagttctttaatgtcaaagcagacaaggcggttatgaatatcaacgtttgtcctatggttaaacacattcaagctgccgtttacatagagttccaatgccgacgcgatacgctgcgcttccttttccggctgcttcttgatttcattgtagaggtcgcccaaaatcggcatattctccggcttcgggtctgcaaggtagctgcggtacacgctgataacggcgcggtcaatcaaggtcttttcaaccgcttccagcccgtttttgccgcccataatgagttcgcaaaaggaaaggataaaatcgctctttaaggctatgggcgtgtcgccctcgctgtaattgaggtttatgtccatcgggttaatgtactgcgtgctgttctgcgaaaccttgataacctgtcctttcagccgttccacaagggggtaatattccgcttccgggtcgcaaatgataatatcatctgcggtaatgagaaaagcgttggtgatctcgcgctttgccgaaaaactcttgccgctgcccggtgtgccgaggataaggccgtttgggtttttcagccgttttctgtcgcacagaatcatattgttggaaagggcgtttaagccgtaatacaacgcttcgccgctttggaacagctcttgcaccgtaaaggggacgaaaatagcggtgctggaagtcgtcaagccccgctggatttggattaggttttcgcccaacgggatagaggacataagcccctgttcctgccggtagtcaaggcgggtgagcatacagttgtatttctgcgcgatacttgcggcactgaatacatcgttgtccaatttctgctttgtgtctgccatattcaaaactaacagcgtaagcaaaaacattcgctcgttccggctttgcaaatcccgcaaaaggtttttcgcttcgccgccgtaggtggcaaggtcggacgggattatatccatatcgtagccgctgcggattgcctttttctgttcctcgattttcatgcggtcaaggtcggtgattttccgcttgatggtcttgatcgcttcgttgtggtcgatactctgaatgtgcagattgacgacaatcccgttttccgcttccatgaagtcggcaagcatacggtctgaaagttccggcgcggcaatctgcaaaaaggaaaccgcgccaaacttcccgcccatttgatacattcgcccgtcgccaaaacggaaagaggacggggcaataaagtctttgacggaaaggccgcttacgggtagccattcccacgcaaaattgaagcgttctccgtccgggtggaaaagcccatgcagcacttcaagccgctgcttcccgtccaatacccgcgccgccgcgccgatcaccttaaaatggttgagggtgtccgtttcgatacgagcaagccgcgcccgcgccgatttaatatcttttgcttcaatggtaaaggtgagaaacttggtcttgataagcccgttgttgccgcgttcaagctgcgtttgcagcatttcggtgtactcggctctgatactgtcaaagtcatcattttgcggggcaatcgtgatactgctcttaaaatcttccttgttcgcatggcggctgattaaggaaagctgcacgccaatcgaagcgtcaaaagagttatacatatcgcaaagggcttcaaaaatggcggtcttgtcgtccggctgcgcaagctgatagttgatgtcctcaaactcaatgcacttggaataccgcccgtttgcaaggcggcaaatcccgtccttatacattcgctcaaacggtatgctgtcctgcgccgtatggggcttcccgtcgccctttgcctgtctgataagggtatctatctgttttctttcctgtcgggaaagtttacgcttttcgttttgggtgtttttcttttcctttgacaatcgcccgtacctccttatctaattgctcttgccgcgcaagggcggcataaaaattgttggtctgataaggtcgctctttggggcgaagaaacttcacttccacaaattgccgtataatcacttccagcggttgcccgttcttctcatacatggcgagtaggaacataggcagcatggcaagcaccatgcacaaagccgccgttgtcgttcccgcgctgtcctttgtcaaaaagaatagcggtaagccgatagccaccgccgcgctgaaacaaattagctgtcgtttcgtaaggttaaacattaccttgcttttgatttttgttaagtcctttgggacggttacatacgccatagtccacctcctttaatgcgcgctgaatacggattttgcaaggcttcccgtcttgaaaagtgtgaagcacaagaggacggtatagcccatgcaagaccagatcgcgccggaaatgtcgtcggttgctgcgattgtctgtatcaaaaccgcgtaaatgccgacgcacacaaggattaaaaacgcttggaaaccgagggcaagcaaggatttcaaataattctgtcccatgccgccccattcgtgatttaccattgtcgcaacggggataggggcgatactcgttacaaggtatatttcaatcatgcgaccgtacaccacaagcataatgcagatagagagggctttcatggtaagccctacaaaaagggattgaaaccatagccccaaaagcccgccgacgctcatagcgtccagctttgtttctatgtcggtgataacggttgcaatatctatgcttgtgtcggataggataacgcccgcgctgtcgttgacgacgctctgcgtaacgtcgaaaacacccatgacgatgttccaagtatttgttaccagcagcaccgcgacaaaggttttgaaaatccacttgaagaaaatccaagtgtcgagatcgtgcagattgtttttctcaattacaagttggattagttcgtagcacatgacaaaggtaatgataacgcccgcaatcggcacaatgacgttttccgaaaggctgcgtatcatattgaatatgcccgcattccacccggcgggggtcgtgccgacttgcgacgcgatttcgccaacctctgtgtttacgctgtcaaacagcccggaaaggtttgataaaatcccgtctgtcaatatgccccggaaccaatcttcaatcatctgccatatcaaaagctaatccctcctttcccgcgccctcccgtttccgagagggcgcggcgggtagtgttaggttgcggcattatccgaacaggccggagagcagcggtacaagggtaaggccaatcaaagcgacgccgccgcccgccatcaactgcttcatgccctggctttttactgatgttcgataaagaagtaatagaagtgtaaaaaattttgccgttcctatccggcacttgcgcattgtgtcggataggtcgggcggttattcgggcaagtccaccttgccaacaaaagaataataaatctcaatgtcctgtctgcgggtcttgttctcgtcatagctgcactcatgcacaacgattttctctacaaactcccgcagcagagtaggggtaagttcttcaaagctggtatgccgccggacaacattcataaacttttctgcgttcacggtggcttcctgtgctttggaaagctccgcttgaatagcagcggctctttctttcagctcccgttgctctgcttcatagtctgccgacagctctgtgaaacgctcgtctgatatgcgcccggtcacgctgtcctcatacagccgcttgaagatagcggataactcggctatgcgtttctcggaggcttccagttcctttttcttggcggcgttcctgcgtttgcccccgtcctcgttctgctcaatcaagagtttcataaaccgggcttcatgctttgccgcatagctggtcactttccgcagattggagagtacaccagcggtcaagaggtcggtgcggataaagtgcgccgtacagtcatgggtgcgtttcttgtagttgccgcagatataacagtcctgcttgcgcttgtccgtctggtatcgctgctgatacatcacgctgccgcagtccgcacagaacagtatgccggagaacaaacccacttcatcatagcggtttgggcgtttgcgctgtttgcgaagctcctgcacccgttcccatgtttgggtgtctatgataggctcgtggtgattctcgaaaatcacttgcttttccgggggattttctacactgtgcttgactttgtaagaaagtttttctgtcttgaaatttaccagacagcctgtgtattcccggttttcaaggatatgcactacggtattggtcgcccacttgcactcatagccggggtggtagcggcgggtgctgcccgtcctgcggtattcaagcgttcccggcgtggggatttgctgctctgtgagcatacgggctatcttggtcggaccattcccggcaagacagaggttgtatatctgcttgactacgggtgcagcttcctcgtcaataatgaaattttcatcctcgtccatgaggtagccatacacaggcttgcttgtgatgggcttgccattcatgccttttgagcgttttactgctttgattttcttgctcgtatctctcaccagccattcgttaaagatattccgcagcggggcaaagtcattgtcgccctgtgcgctgtccactccgtcattgatagcgatgaagcggacacctttctgtgggaaaatcatttctgtgtacattcccacttgcaggtagtttcgccctaacctcgacatatcctttacgataactgtcccgacttttccggcttcaatgtctgcaagcatggcttgaaaaccgggtctttgaaagttcgcaccagaataaccgtcgtccgtgtaccagcgcagattggaaaagccgttctgctttgcataggtttcaagaatacgcttctggaaagaaatttgtcaagggtattttctctactaaaacacagcatttgccatgcggcaaataactgtctaatattttcgttaggctaaaactgtgcactatcagttctgcttattcagtgcgcaagttcgtatttccctgcccatgataaatgtctcgtctgtactgtttatgttgaaacgaaagtgacatattgacaatctgaaatatgcgtgctataatttatagtaatttaataattcaaaccgttgaagcggagataacggcaatgatgcctttacagagagcctgtgttgctgagagtcaggtaagaaacaagttgtcaaatggaccgctgagggcgcagtcaaatgtgatttcacaaagtattctgcgacgttgcaggcagacgtcatttgccggggatatgtaggtatcctgctaagtgcacgggtcatgccgtgaatcaaggtggcaccgcggataagtgttttattcgtccttgacagaaagtatatttctgtcaaggacgtttttgttttatagaactcctttgactgagatataaagtcaaaggagtcttttcctttttaaggaggttgcaatatgcttcttgtgaaacgttggtggcgctccatgcgcctaatgaaaaattaaatccgtaaagtaattcccaataattaaatttaatcaatttggaggtgcagtaaatgaaaattcggccaactttaacggaggtcaggaaaattgcttccgaattaaaatataatgtgctgccggtaagctgtgaaatcctttccgactttacaacacctatcgaaaccatgaggatcttgaaaaacatctcgacacactgctatatgctggaatccgcacaggcaaacgaaacctgggggcggtacaccttcctggggtttgacccgaaactggagatcacctgtatggaaggaaaaatgcagattggcaatcttaaagtgacgacagaagatccatctgcctatctgcgtcagatcctcgccgattacaaaagtcctcgttttgggtatcttccctcttttacgggcgggcttgtcggatatttttcatatgattacctcgggtacagcgagcctgctgtgaaatgtgatgtggaagacacggaggcgttcaaggatgtggacctgatgctgtttgacaaggtgatcgctttcgatcacctgcgtcaaaagatcatcctcatcgtcaacatgccgctggacgatgtagaaaccggctacaacaaagcggttatggagttaaaacagcttgtagagcttattaggcatggcgaaaagaaaaaggaacccgaaggaagactgcttggagcggtaacgccgctgttcggcaaagaagagttttgcgaaatggttgaacaggcgaaacatcatatccgcgaaggggatattttccagatcgtactttccaactgtctgagtgccccctttgaagggagcctgctcaatacctatcgtgtacttcgcaccatcaacccatccccctatatgttctatttttcggggacagatgccgaggtagccggcgcttctcccgaaaccctcgtcaagctggaaaacggagtgttacacacctttccgcttgccgggaccagaccgagagggagaaccgatgaagaggataaagcattggaagcagagctgcttgaggacgagaaggaacttgctgaacacaatatgctggtggatttaggacgaaacgatctcggaaaaatcagcaaattcggcacagtgcaggtcgaaaagttccattctatcgaacgcttctctcatgtcatgcacatcggttctacagtccggggagagatccatgaagataaagacgccttggatgctatcgaggcagtactacccgcaggtacgctctccggagcgccgaagatcagagcttgccagttgattggagcgcttgaaaacaacaagcgcggcatctatggcggtgctatcggatacatcgactttacgggcaatatggacacctgcattgccatccgcattgcctataagaaaaacggcaaggtgtttgtaagaagcggtgccgggattgtggcagactctgtctctgaaaaggagtttgaggaatgcctgaacaaagcaaaatcttcactgaaagcactggagcttgcacaggaggaagaattatgattcttttggtcgataactacgacagtttttcctataacctttatcaactcattggcgagatcgagccgaatatcaaggtcatccgcaacgatgaaatgacggttgacgaaattaaggaactaaaccccgaccgcattattctttccccgggtcccggcaggccggaaaatgccgggatcatcattgaagctgtaaaaacactgggccaaacaattccgattctcggtgtttgtctcggtcatcaggccatctgtgcggcattcggtgcgacggttacttatgcaaagaaactgatgcacggcaaacagtcgaatgtcagatttgacgcagattgtttgttattcaaaggttgtcccgaagttgcacctgtcgcacggtatcattctcttgcggcagatactgacacaattcccgagtatctgaaaattaccgctctcaccacggaaggcgaagtgatggctgtacagcataaggattaccccatctatggcgtacaattccatcctgaatccattatgacaccggatggaaagcagatgcttagaaattttataaaggagatatgagccatgattaaagaagccattgtaaaaatcgtaaataaagaagacctcacctatgacgaggcatacaccgtgatgaatgagatcatgagcggtgagaccacacccacacagaacgccgcctttcttgccgcactttccaccaaaagtgcaagagctgagacgaccgatgagatcgcaggctgtgcagctgctatgagggcgcacgctaccaaagtcgaaaccggtatggagctctttgaaatcgtcggtaccggcggcgacaatgcgcacagctttaatatctccaccacctccgcccttgttgcggcggcgggcggtatgaaagtagcaaagcacggcaaccgagccgcatcctcccagtgtggaacagcagactgtctggaagccctcggcgtaaacattcaacagagtcccgcaagatgcatagaacttctaaacgaggtgggtatgtgcttcttctttgcacagaaataccacacctctatgaagtatgtgggcgctattcgcaaggaacttggtttccgaactgtatttaatattctcggtcctctcacaaatcccggaacaccttccttgcagcttctcggtgtgtatgacgattatcttgtggaacctctggcgcaggttcttattaacctcggtgtcaaacgcggcatggtagtatacggccaggaaaagttagatgaaatttccatgagcgcaccgactacgatatgcgagatccgagacggctggttcaaatcttctgtgattacgccggaggagttcggatttgaacgctgcacgaaagaagacctgaagggaggcacacctgaagaaaacgccaagatcacccttgctatcttaaatggcgaaaagggtcataagagaaatgctgtattgatgaacgcaggtgcggcgctttatatcggcggtaaggctgacagcataaaggaaggtattgcacttgccgcagaaatgattgattccggcaaggcactcgaaacgctgaatcagttaatcgaagtcagtaaccgtccggaggtgggggtatgacgattctcgatcaacttgccgactacgctcgtcagcgcaccgagcaggcgaaaagggccctgccgctggaagaaatccggcaccaggccttagcccttcccaaaggggatttttcctttcaacatgcactgaaaaagccaggagtttcttttatctgtgagtgcaaaaaggcatctccctcaaaaggattgatagatcccgattttccgtatctgaaaattgcgaaagaatacgaagcggcaggcgccgactgtatttcggtactgaccgagccaaagtggtttttcggcagtgatacatacctcgaagagatcgcaaattctgtttctattccgtgtttgcgtaaggacttcacgatagatgactatatgatctatgaggcgaaggtacttggcgcatcggcggtgcttctgatctgttccatactgagtgagaaacagatgaaagaatatatcagtatttgcgatgaacttgggctttccgctctgatagaggtacacgacgagcgtgaaataaacatggcactccatgcgggagcacgtatcattggtgtcaacaaccgcaatctaaaggatttttctgtggataccgataacagccgcagactcagagagctgataccccgtgatgtgttgtttgtctcggaaagcggagtaagcagtgcggaggatgtagcaaagctacgtgatatcggtgcggatgccgtgctgatcggtgaaacgttgatgcgggcaccagacaaaaaagccaagctcgccgaactgcgaggtgtgttatgacaaagatcaagctctgcggtctttaccgcccttgcgacatcgagaccgcaaatgagctgaaacccgagtatatcggattcgtcttcgcttcgaaaagcaagcggtatataacacccgagaaagcagcaaatttaaagcgattgcttaacccgaacataaaagctgtgggcgtgtttgtagatgaaaatcctgaaaacattgcctgtctgctgaacagcggcacaattgacatatgccagctccacggaagcgaagatgaggcatatatccatgatctgcgccagcttaccgacagggcgatcatcaaagcttttcgaatccaatcggcaagcgacatagaggctgtaaaccgctgcaccgctgagtatgtcctccttgattccggcgcaggtacaggaacgatattcgactgggcactcatacagggcatacaaaggccctatttccttgccggtgggcttggcattgataatgtagaagctgcggtgaaattgctccatccttatgcagtggatgttagttcaggtattgaaactgacggactgaaagataaaacaaaaatggcggcatttgctgccgctgtcagaaaggaagaaaaaatatgacaaatccaagcggacgcttcggcattcacggcggtcagtatattcccgaaacactgatgaatgcggttattgaacttgaagaagcgtataatcattacaaaaacaacccagatttcaacagagagcttaccgagcttttcaacgaatatgccggaaggccttcccgtttgtattatgccgaaaaaatgaccaaagatctcggcggcgcaaaaatatatctcaagcgtgaggatctcaatcacacgggggcgcataagatcaacaatgtactcggtcaggcacttcttgcaaagaagatgggtaaaacccgactaatcgccgaaacaggagccggtcagcatggtgtagctacagcaactgcctctgcgctgctgggaatggaatgtgtggtatttatgggcgaggaagataccatccgacaagccctcaatgtgtatcgtatgagacttttgggtgcggaagtcattcctgtaaaaacaggcacgggcaccctaaaagacgctgtttccgaagctatgcgggaatggacatctcgtatcgatgatacccactactgcctgggttccgtcatgggacctcatccgtttccaaccatcgttcgtgattttcaggccgtcatttctaaagaaatcaaagagcaaatgatcgcaaaagaaggaagacttcccgatgcagtgatcgcctgtgtgggtggcggctccaatgccatcggcagcttctatcatttcattgaagacgaaggggttcgtctgattggctgcgaagcggcaggcagaggcattgatactgcagaaacagcagctaccattgccaccggcagacttggaatttttcatggcatgaagtcctatttctgccaggacaaagacggtcagattgctcccgtttactccatttcggcaggcttggattatcccgggattggccctgagcacgctcatctgtatgatatcggaagagcggagtatgttcccgttacggatgatgaagcaataaatgcttttgaatatctggcaaagaccgaaggaattatccctgccattgagtcggcccatgctgttgcgcacgcaataaagattgcaccgaccatgggcaaggagcaaatcatcgtgattaccatttccggcagaggcgacaaggattgcgccgctattgcccgttatagaggggaggatatccatgagtaagattcagaaagcatttgaaaatagcaaggcgtttatcgcctttatcacctgtggcgaccctgatctggaaaccaccgcgaaagctgtccgtgctgccgtggaaaacggtgtagaccttattgaacttggtattccgttctctgatcctaccgcagagggtcctgttattcagggcgcaaacctgagagcgctgaccggcggtattacaaccgataagatatttgcctttgtgaaagagcttcgccgtgatgtgaaaattccgatggtatttatgacctatgccaatgtcgtgttctcctacggtgcggaaaaatttatgtccacctgttgtgacattggaattgacggactgattctgccagatctgccgtttgaagaaaaagaagagtttcagccgctgtgcaaaaaatacggcgttgacttgatttcactgatcgctcctacctctgaaaaccgtatcgctatgattgcaaaggaagcagaaggtttcatttatgtcgtgtcaagtcttggtgtgacaggtatgagaagcgaaatcaagacagaccttgcttccatcgttaaagtgataagagaaaattccgacgtgccctgtgcgatcggattcggtatctccacacccgagcaggcaaagaaaatggcgaatatatctgacggtgcaattgtcggctcagcaatcatcaagctgcttgaacagtatggaaaggacgcgccgaaatacatcggagaatatgtgaagaaaatgaaattggctctattgaccaattagtggtagtagtgatctgtctttagaattctaataattcagtgaacaggaacggggtttaccgttcctgttcaccctttttcttttgaaaagtctgctgccccttctgtgcctgccgtaccatcctccgcacagcctgtcgctccatatcctcatgcagcatacgggaaaccgcctttttgctgtcaaacatcagaagcgggttgtacttctcgccgtaaacctcttgcgcccggttctccgcttcctgctccttgctggggcggatggcctgtcttgcttcatacagctgcactggatcgaagctctgtgcctgctcctgaagcccggtatactcgttcagggcagcgtccagctcggcggaatatttttgttcctgttcttccaaccgttttaggctctgctccatagcaacgatgtcctttggaaatttatcggcagcatcttcctcggtatatgccagagacgccagaagcagatttttctccgaacgcagttcctccaaatcctctgtcagagccgcaatcttagccgccaactcccggtgccggaacacatggacagcagagagcgcctttttctcggacagcaggctgcggcgctcttttgtcttatcctgaatgtcctttgccagctggttgtactgtgtgagggcagggcgcagcgtattcagcgaggtgttcaggcgttctttgcccttgcggagataccccagctgatagcagaacagcagcagatttttacgcagattctccatggcctcggcaagcgccggaatggtatttttgactgcctgcgccaactttttgacctgtcccctcagctcccggagcagggcattgtcggccttgatctgtcggttcagctcgcaccgttcagagatgataccctttttctccatggctctggcaaccacgccctcatgaaccgtaggccgctccagcagaccacgttcggcatggctgcggtggtcgatgcgttcttcgtgcccggtgcgctccagatagccgtttgccacatccgcccatgcagcccgccacagaacaagttgctcatcgctgttccagcgttccgtgatgggattctgtctgccatatttggtgcttttgggatacttggatacccgttcatagccctgcgcctgcgctgcggaaggggccatatacaccttctttttgcccactttgtactggtactgtttctcccagccgtcggtctgtgcctgtttgaactcggcggcggtaaagccccgttcctcgccgtctttgacgcagagatattctttctcggtcttgtactgccattttcccttttcatccagtgggcgcaccgtcagcagaatatgggcatggggattgtgtccgggaggatatgggtcgtggatggcagcatcagcgcacattccgtctgccacaaattgctccttgatgaaatcttgcaggagttggatttgtttctcccggctcaactctatgggcagcgccgccacaaattcacgggcgaggcggctgtcctttgcggtttcggtttcctccacagcgttccacagggtttcccgatctgcgggggcggtggctggcagaaaaacctgccgccatccaagcccctgtttgcgggtgtagtcgtgctgcaccccgtcgtactcgttgcgcatccgggaacagctcagataggccgcagcagccacggcggagcgcccggctccacggctgaccatcttggcctccaaatgataaatcgccattgtctaccatcctttctgaagagctactgtgaaacgcagtagcccttcttccgtacttgattgcaacagatgcgtcgtgaaatacgacgcaccacccctgcatctgtgtcaagctgccggtggcaggttgaagcaggcaggcggcgggatggggtggcaatataccaccccatgaacaggggattccaaagtggaaacccctgcgccgactgcatgggcaaggctggcagtttggcagaaatgcagccttgtccagcggctcccgcaggagtcgcaatccccctcggagagcgcacgtgcccgaccaacgggagggctaccaccgcctgctttagcaggtggtgagtaagtgcgcccttcgggataaaaaagaggaaggcccccgttttcccggagacctcccagcagttttcaatcgtgtcctgccagctttcgccgcaggtactcttccagattatcaagccctaccgcctgtacttccggcagcactttttccagtacagcgccctcctgaatgagccgccttgtccgggcttttcgctccttcacccggtcccgtgcctgggcttcctccaagcggtgctttgcctgcaacagtttcttttcttcacttgtcatgggattacctccgtttctgccagattaggtcatagcccagcacatcggccagttccacaacctccttgtagcggatggattcccgctggagcttggccgacaggttggaaacgctgtccgaccagttgtattcctcatggagccggtcaactacctcctgcatggtgtatcccgcccggacgatctgtgccttaatctcgttgcgtaccgtcatcataaaaatcctcctaaatttacttgataaaaaagcgaagccggtacgccctctggcataaccgcttcgctgtgtcgtgaaaaattctctcgtcaacaaatccgttcagaattgccggtgtgatgtcctgtccataggtcgcaccttccgacttttccgtttcgtgtgatttggcttgaaaccgtgcattttcccatggttccatgcactcggttcaccggggtgagaagcacggtttcgcaaaatgatttcttccaaccgtcaaatacttttcgattcccacttgccttgatttagcatggggatttgatcggtgattctgactggtatagccgccgaattgctataaaagggagaacaagggtcaatcaaagtgtacgtacgtacatagctcagcgccgccattcttccggcacatcttccggtacgtacgcatcgaatcaccggaaaacactgatatatgatttctcaccagtacctcaatccccagaaatccacgcacccgccgtccggctgcgttggtcacattgttgcagtattccagattgtagcggctctggcaggcgattagggcttcgctgaagctgcggggcttcagggcaggcaggttgttttcggtgcagtaaatctggtatgcctcgtacagttctttggagctggcagatagatcggctttcaggcgaacatacccgtcagaatccagaaaatcaaaaatattgttgttgtcccgtttgactgcctcccgattgtcttttgtgcgctggctctcagtaaacttaaaattgtttgcggccagccgctgcaatccctcaaaagcccacagcaggatgccctccacctcggccttcatcttctcggcaaggtcaggatcatccacacggccagccggtttttctttcgtggttagcaccagctggcggcgataaaatccgtcgctccggtcaaacagcgcctgcaaatctccgttggagaaggccagcagccgggcgcacatccatccctgatagctctgcttgcccttgcgctccaaatccatcttgccctgggcggtgacgatggatttcacatagttggtctggcgcagggcctccattcgcatatcgtcatccgcgcacaggaggatatgttccaggtcagcacgggcaaatcggttctctgatattttcccgatactgccgtccttcatattggagccgaataaagttcccaagacagcaccaatctggctcttgccctcgccaccgttgcctttaatcaccatcatccgctggcccttgttgctgggaatcaggcagtaaccgatatattcctgcaaggttggtatgtcctccgggtagagcagaccatccagaaatttaagccagagaacaggtttcggagcgttagggttgtaggccacgggaaagcggttgcggacgattttcggctttccctccacaaaggttccatccagaaaaagtgtgccgttggaaagatgaatccgatccggctccgggggaaaatcctccaccagcgccgccagtttcatcagctccacaatgttgctgattttgcggggaatattgctgaccgcacagcatttcagctcctcaaaaatttctccccgcaagggaagttcatcggttacacggccttcgggtgtaaaaaagccccgtttgtgaagatgatcttgtgtgtctgcaagaactcctcacaaaacagggcttcgttgatgctttttccatcaaaccagacgggcatcccgtcaggctgcttgttctttttcatctctttgttcctcctttttcaaccgttccaaccgttcctccaaaccggaaatcaagccgtctttgttcagcttgtctacaattttcacccgctgttccagctcggcggcaatgagcaaatccgtcagatactccacatagtccatcatctgacaggcttctacaaaccggtcatccagaacatcttccggtgtcttaggtgcgtactgcatcttccagtcttccaaaagatgcagataatcgcacaatacccgcagacagcgcacttcctcctgctggtacgccttcagtaggggacgttccggtttgggcagagcgattgctaccggtggtttgtccgggtcaatgccaaagtcataagccagctttttagccgcctcgtagctgctcaggtcaaacaacctcgccacaaggtcgatcacatcgccggttactccgcagccgaagcagtaaaaataccgttcgttcagcttcatgctggggtgcctgtcctcatggaacggacagctgcacatcccgtttcggttgacttgcagcccatagtgtttcgctgcatccggcacacaaatattctgttttaccagttcaaagagtgtcataaaaatccctccgtttcagggcataaaaaaagcggcctgcccggtttgttggggcaggccgcagtccttatgcagtttgtgatgtttccatttctttggccttccgcttttcctgccggtagaacttctcccggcaggcgggtttgcagaatttagcgttggggcggacagactggaacggctctccgcagcactggcataccagctggtacggttcacccggaacgatgagcccctcggcaatcttctgtttgcgctccttctggcgcagatacttttcatggtcacggatgcgcttctggcggcacttttcctccgcagccagttcttcctcggtgggttcgggcatgggcacttcaaacttcccgatgaaattcagataaatctcaatttcctgcacccgttccccggtgcttctgtccggggcatgaaccagaattttctccacaaattcatggatcataggggcggtcagctcggtgaaatccgtatatttctgtgccagcgccagaaagtggctggcacggtccgtgtcctcatgaaactggtccagctgcgcctgctcggaggcaagcagctgttccagctccgcctgttccttctcatattccgcacacagcagctcgaaccgtttttcttccagtttgcccatggcataggtttcgtacagctttttaatcagcacatccagctcggcgctgcgtttgcgctctttggcaaccttgcgtttcagctcctttgccgcttcctgctggcgaacctgtgaaatgctgcgaactttccgaataaattcctccttgttctggatggcatagctggcggtagtccgaatggtttccagaatcagggcgttcagggctttggtgctgacggtgtgggaaaaacacatctgggtttcacgctcaaaagtcagggtataggtggagcagttatagaagtcggttccgtactcccgcccgtcctttttgcgcttgccccggtggttatacatcttggctccgcagtcggcgcagaacacaaggccggtcaggggattggcaacgccggtggtatctgtccggcgcacggttcgcttcacttgctgggcaagctgccaggtttccgggtcaacgatggcctcgtgggtgttctcaaaaatcagccagtcggacgggtcattttttacccgtttatcccggtaggacttcttggaagaacggaaattgacggtgtgccccatatactccggcttagtcagcatggagctgaccgtgaagccgtaccagtcataggggcggctggcgtccacggtgttttttcggcagcccctgccgtttcgtgccagataataggcggggcactccaccttttcctgtgtgagtatcttggcaatctcatgggggccgtgcccctccaccgcaagccggaagatccgtcgcaccacggcggcggcttcctcgtccaccagccagtggtccttgtcctctgggtcttttttgtagccatagatggcgttgttggtggtgggcttgcccgccttgcccttgacacggtatgctgccgaaacctttttggactggtcacgcagataccattcattcatgatattgagaaagggcgcaaactcgccactgtcctgttcctcgctgtcgatgttattggcgacagcaacaaaatgaaccccattctgccggaacattaccccggtgtaaaagccggtttgcaggtagtttctgccgatccgacttaggtccttacacagcagatgggccaccttgcccgcctcgatgtccgccacaaggcgcttccatgcgggacggtcaaagttgccgccggaccacccatcgtctgtgtagtggacgatattggtgtagccccgctgtgctgcatagctttcgagataacgtttctggttcagaatggagttcgagtcacccgtgaggtcatcgtcacgggacaggcgctcatagagcgcagtaattttttcttccgtctgtctgtttgccatatcaggcgctcctttcagacggacggctcatttgtggcagttccattataccacattccggctggtttgccagcccgtcattgcggatcagccgcagaattttatcttccatcgtttcctcggcggtttcgctgaggtagacacgaactttataggtggtcttgccaatgtgccgagtcagaaacacggcgtttttatttgccatagaacctctctttcttgcgctttcagcgcatccggtgtatactgttgttatagttccgttgtttgtaatccgtgattgtgttacttcttttttgtgtcaagccggaacatggcgaaagccccctttctcctgcgtgaacgagccaatgtaacccaagtaacttgttttcagattactctttcactaataggagaaatccggggtgcaaaacggaaccatttttgaaaaatcgcaaaatatttttttgaaaagaggtggggtcatggcgtatctgtctgatgacgagcttctggataccgagggtggcttcaccggatgggacgatgggacaggcgctggggcggaggaaacgctggaacaggcgcttgcggaagaacgtttggcagagctggaaagcgagctggagcaggatgagcatcccgttgattatgatgccgagctggaggacgaggaagaagaagccgccccggtcagtgataagcggctcaaacgggagatgcgggccgaggccatacggcggctggaggaagcagcacgcacggagaaggatttccgggccgtagtggaggaatggaacaagctggaccggaaccgggagcgcagggaacgggaccacgaaaacctccgtggggatgtgccgctggaatatcaggcggtgccggaaccaaagctcattccccgctggatgaacaaccctacgtaccggcagctgatggccgggaactttctggacatcctatttgactgcccctatgagatgcacaacctgactgccgacccctttatttcccgcatggtggaggaactgagcgaggaacacaaggaagttttgtatttcctctctttgcggctatacagctctacccggcttgccgctgtgcgtgggcagtctgaccgcaatatccgcaagctgtggaaaaccatccacaagaaattgcagcgccagatgtatgaccatctgtgcggcaaacaagagcatggcggcagcctgaccttgcgggagcgccagtttttggaggaatactcgaaaatcgcaaagaaacagggcaaggacgccgtgatccggcgggagaacaagaccaagcgcagaaaaaagaaaaaccgcccctgataattgggacgattaaggagaaagggcgtgtatgatgaaaaatttatttgaacagtcccgttcccattgggtgcggtacgatcattatgagttgaaaacagcggaagatggcaagcggtacatcacccccggcaaaaacgcaaagccggatgtctacaatccgctgaaagaggtccccaacattgtgctggatgcgctgaatgtggggatgttgatgatggggcgcaagccggaagcagaagttgaaaaagcggtgatggagtttgttacccggtacggcctgctggggctgatgaccgccctgcccaccacgccgtcctttatggactatgaggcggtatacctgcccaaaaaccacttcattaaggaagaatccatggcgacagacaaatacctgtccctgttttatccttttgaccagctggacttggtgaagaaaggcattgaatcctcctggaatgtgtccggtgaccggacgatgattgccctgaccatgaccttcatggacgagccgatggcgaagaacatgagcttccagcgggaatatgcggaaccctacgactgggttgcccagcagttcaaagattgggcctttacactgaccaccgccattttgtactacaatgactatgattccattgacgaggacgcacgggggctgtaccgcaaggccatggccgcatttggtgggatcgcccccagctaccacatcgagctgttggataagcccaccatctattgggatttccattcgctgctgctgggcatccagatgatgttcagcttcatgttggtagacggtgaccagcccctgcgcctgtgcaagcactgccagaaagtgttcctgggcagccggtccaacgccgccttttgcagtccacggtgcaaaaatcagtacaatgtttacaagagccggggaaagaaccggacggatggaggtgacgaggaatgagtgaggaacaggggctgaccccgtatgaaaccagagaaatcctcttttacaagactgaaaacggagaagtccgggtggaaatcctgctctttcaggaaaacctctggctgacacaggcaaaaatggcagagctgttcgaggtacagaaagcagctatttccaagcatctgaaaaacatttttgaatccggcgaactgaacgaggattcagttgtttccaaaatggaaacaactgcggcggacgggaaacggtatcagaccaactattacaatctggacgccattatcgctgtggggtatcgtgtgaactccaaaaaggcgaccatgttccgcatttgggcaaaccgggtgttaaaagagttcatcatcaagggctatgtgatggatgacgcacagctgcgagagccggagaactttttcggcaaggattatttcgaggaacagctggagcgtatccgggacatccgggccagcgagagaagattttaccagaaaatcacggacatctattcccagtgcagcgccgactacgatgtggaaagccccatcacaaaggagtttttcgccacggtgcagaacaagctccactatgcggtcacccatcataccgccgccgagatcgtatatggccgtgccgacagcaccaagcccaacatggggctgaccacatggaaaaatgcccccaaaggccgcatccgtaaatcggatgtcaccgtcgccaaaaactatctgaacgaaacggaaatgcgaaacctgaacgagatcgtcaccatgtacctggactatgcggaacggcaggctcgccggggaaatgtcatgtatatggccgattgggtcaagcggcttgacgcatttttacagttcaacgaggaagatattctgcatgataatggcaaggtgactgccgccattgccaaagcctttgccgagaaagagtttgaaaagttccgggttttgcaggacagaacctatcagagcgactttgacaggctggttgcggaaacttcggatgatttgacagaataaccataaatcgaaaaagcccacgcctccggtcctctttccggctgcgtggcctttttcggtttatatttatttgtaccataccccactttggggaaagtgatatcattcaatgccaaactctggagcgtatttgatcgttccgtgaatttcagcgccggtttcgtttaacacacaggccatgaagttttcgctgggtacatcaaagggagcgtttatcccgaaaccttctgcgggggaataacctgacttgggatagtatttttcgcttcctaaaacgatggcatgggtataacccagttcttttgcaattttgtgtccttcttggatcagggcttttcccatcccttttcgctgatactccggcaagacagacagcggggctaacgccagaacaggctttccgtcaaccgtcgctcttgtaaacatgatatgacctacaatttttccgtccgcttcagcaaccagcgacaactcagggatgaacgcatctccttttcgcagggtattcaccaaatcctgctcgtttccatcggcgtgttcggcattctcaaaggcacgttttacaacggaatatacggcctcataatctgttgccgtttcttttctgatatgcatagaaacctcctaagtttataaatctcgttatcatgttaaatcttatcataagaatgggaataaatccacccaacaacaagtctgcctgaaccgaggaattacggttcaggcagactatgtttttttgctacttcttacttagcagatgttcatgggcttcctgctggacgatcagccccgctgaaaagccatacttgaagtggctctcactttcctcacactgggcgatagcgttctgcgcccggagttcttccaccagcgcatagtcctctttgctgaggcgctgggataactgctccatcaacgccgcacaggtttggaccgccttgcggtattccgaggacgtaggaacaacagtttcacagggataaaactccccgttatacatggcttccaaaatcatagcgttccctccctcaacagtagaccagctcggccaggacgacttcctcggctctgttgtggatggagttcatggagcgcacccatgccatctgttcggcagctttcagggcttctgtgacaccctcttgctgcatcatggcattttcgatgatttccagccgctcccggcaggcggtgtcgatttcctccaagtggggaaacagcttttcggtgacaatgagatcagtatacagaatgggccggtgttcttttaagtaggcacggcgcaaccggccatatttcccgatatgatattctttgttgtccgataacacaaggtcgggaatgagataatcgccgcattttgtgtaagtcagttccatacaaggctcctttcgtgggaatgtggttgacagttacggtaggtttgagggcatccctcctttatcataactgtcttttcattcgccacaaatgagccgccagtcatgatgtaatgttttttggtgtaatccaccctctatacattacatcatggttggaaatggaattgctttcgccttgcagctcgtcctcatgggatagtcttgggtaaagggcggtaattggttgttggttggtctgtcttaacataaaatcctccgtttccgacagccagccccactattccgtaccttgattgtaccacatggggcggctgtctgtatagcggcaaaagcgtcaaatctgcttctttatggtcggtcaaatcgccgttttttgtgtagcagcttccgcttccagcactttcatcatcttgtcggctgcggtgtcggttgcgccctgcttgaagaagccggaaacggtaaggacggagttgcccatgcggatttccgtcacacagtccgggcggcggtctgttttggtggtgcttgtctgtttcgtttctgtcataggctctcctttcgctgcttcatcagttgctttaagcgttccagcttttcctgtgcggtttcctttcggaagttgctgcccgtgaagcggacgggggcgcacatggaagtcagcctgtcatagatacgggcgtggggcgtgtcctgcgggtgctgcaattcctccagcgtgaggttggtcgtggcgatcagcggcttgccgcttcggtaacggctgtcaatcacgctgtaaacctgttccagcccgtattctgtccctcgctccataccaaaatcatcaagtatcagcagggggtagctgcaaaggcgggaaatatattcgttcctgccctcaaagctggcggcaaggtcacccagtatcgttgcaaagtttgtcatgcacaccgggacttcctgctccataagggcgttggcgatacaggcggcaaggtagctttttcccgtccccacgcctccccaaaacaggtagccgatattttcagcctgcatggtttcccagctctccacataaaagcgggcggtttcggtctgtgggtttctgccgttgtcatgctcaaatgtccagttccgcatagcagggtcagtaaagccccggcgtttcaagtcctccactttttcaaggtgcttctgtcggctttcggcggcttgctgcttttcacgggctgcccgctggcagtcgcagtctgttgggtggcggtcacgcccgaaacaagtctttccctctgcaaaataggcttctttgggcgtatggcacttaccgcagtataaaagcccgtcctcgcctgtgtaatcctccgcttcggtggtagtggttgtaatgtccgtaatcatagcttcaatctcgtttttcataagctctcgccctccttgcatgaataatcgggtatgccctgtttcggggcagccttgcctttggcagcgtcctcctgcgcccacttgtaaatggtggctgcatggctgtggtactgcttcccggtggaagcgatatggcaggaaagccggtcaaggtaatactcccacttgtcgggcagttccgctttcagctcgtccagttccgtatcggaaagaaaaacattgttgtatctgccatagctgcgggcgggggcttgtcccgtttctaactctctctctttttctatctctatatctatctctttctttatctctatctctggtggacgaatgtcggacaaatgtccgccgtttgtccggggtggtggcaaagccttgtttgcaagccttgccgcccgttttcgttccgcttcggtagaggattgccctatcatcagttcaatatcggtcatgtagagcaagccgccgtgtagctgctccacaagccccaactgctgaaaaatccctaacgcccgttccaccgtgcctacctgctgacgggtaagagtggcgatcatctgtgctgtgtaagggatattctcgtcaagctgcaacttgccgccgtttttcagcgattttaagtacagcttcaagagaatgttggaatagagaataccgtccggcatactctccaacagcacgatagcgtcatcatcaaaatagctttctttcagtttgaggtagtaatatttgcggttatctgccataggcggtgtcctcctttggtttccaacgcttggagtaataccggtggcagaggataatcacggctcggaaactctgcttgcaatcgtgggtgcaaccccggcaaaggtcgttataggtaattcggtttcggtggttgaggaaaaagctccattcaagccgccgtttgttgctcatgcgtggcattggtacgctcctttctgccgtttccgtgggtatcacggatagggcgggaaaactgtatcttctcggtatcattttcggggattttttgccctgtacgccctgttttgaggtcggggagtattgcggataggggtaagggcatatccctgtttttgtttggtttcggtatcatttcggggcggtttttaacgctcctgttcatgctttttctgtctgctcggttcgccgtggtgcatttgggaaagattgcttttcatggtctgcaactcccggacacgctctttatttgcccggtactcgttgtaaagggcgttcttctcggcggtaagctgctcgatttcagcctgcaacgatttataggtgggcagcttggtaatgcctttttgccgaaaatatcttacggctgcgtctgctatgataaagtcgctttcatgcttttcccggtaggctttgcgtgccttatcggttttctgctttttcaatccgtcccgcacatctcttgtcttgacataggcaagcacctgtttctgcaagtcctttttctcacggatagccgtttcaatgggcttcagcttggcggtgctgctgtgtaaatccgcattggcagacacaagggctgcgtccagttcatccggggtaaagccgtattgctccatagcggcaacggtagccgccatctgtttgagattgtggacagccgcccaacggtcatagccgataccttttccctcggctcgcttcgccgcacggtcaaccattctctgtatgttgcctgtcggggcgattttctgcgtttttcctcgctctgtgcggtttgtttcagcggtatggtattcgggtatgggtgcggtcttttcggcggctctgtgggcgttctgctccaaaagagtaagaacagcagcacggtcaaaatcatctcccagttttcgggcggtaatgggtttcgttctgtccggggtaaggtaggacaaccgccctcggctctctttgacgatcacaccctgccgcagaagtaaagcggaaaactcgtcaaaggtagtagcttcgctcatggcgttccgtatggtctgccgcagcttcatcttgtcggtttcgaacttggtctgctttgcaggctgcccctcggctgcaagggtggcattttccttgtcaagtttggcttgtcctttcttctgcgcccaatactcacgctcggtaatgcggtttttactgccgtggagcaggtcaatctgatagagattttcccggtggcacatctccatgacttcggctttgaagtattccatagcggcgtccgtacatcggtgtttgcacccggcacgggtgtctgccggtctgtccatgtagggcaataggggtacttcttcaatccgcagggaattgataacgatgtgaacatgaatattgccgctgtggttgtgtccgtccgggtgggtgcatacaagggcttggtgtccggggaaatgttctttacagaactgctcgcccagctcctgcgcccggtctacggtcaagccgttgtctgtcccgtcccgtgggtcaaaactgatgatatagtggtggcttttcacatcttctcgtttttggtttttctcatagcggagattggctcgcatacaggcaacggcgaaatccccgcccccgcagttaagggaagaaatgcggtagtcctccctcggtatcagccgcccgttttcatcaagggtgggcttcatggtaaactcgtcatgctcaaatgtgagataggcttccgctgcgccatagtcggcatttttagagctgatatgtttgaatgttgccaacagcgtcacccactttctgcaagacttcaaactttagggcagcaaggtcggaaaccgccgcccgtacctccccggcaagctgcgggtaggggctgtgccactcgttcagcgtccgggctatctggtttaagttgccgccgatcctgccgtattcggcggtcagcttcccaacagcggcaagcagctcatcgttgacgggggaaacggttatgatggggcgtatggctgccccggttatggcttgccggataaactcggcttggctcatgttgcaggcagaaagcctttccgcaaactcggcatattcttcctcggtcatgcgtgtcttgactacccggctgcggtgcggcgtgttatatcgttttcgcatggtaaaacctcctttcggctgtgcgtggtgtcctctcactaatatgagaaaaacagggtgtaaagcggaactgtttttgaaaaatccgaaaaattattttgagggatttttcagcggcgcaagccgcataagcagggtttggggaaggcactccccaacaagattcccgcaggggcaaaatgagcgaaaagcgaattttggtactgcggtagaatcttgctctaaaaaactaccgctttcctcgctctaaaaaactaccgctttcctcggcggctctggtttgcggatatactggcttgctccaccaatatagcgattgcggcggcgtgttctgcccgctgttcaccactacaacggtgaaaaggggtcgttttggcaaacgcagcggaaatttttttgttttccctgtctgctccctacaacaatccggcggtgtggtttgccaaagatttttgaaaatgggcgcaaaaaaagcagtaaaccttttcaagatttactgcttatctgccgctgtgatgggcggcggtattaaattgtcagccgtttttcaaatggaatttatctgcaatcgctttctttctgctttccaattccttttctgtaatcttccataatcctaacgcaatgatctgctatcttttgcattccgagttcttcaaaaaaggcaatttgtattttcatcatttcttcacaaacagtcaacttctgctcatccatattgctaatagcaagccatgggaacgctttatatttcttagtgtccccaatgagaaaattgtaccctatcaactcattttcacggaaaacgaaatagaattgtgggcctgaacctggaactgacttttccataatttgctgcattgttttcacgccgccgtatgccggaaaaaaacctattcgctcaagagcatttaatatgtcaatccttttatctgtgggtatgtctctataattgataatctgttccatttgctctaccctcattgaagtttaatttgttaggctctaattatacaacttttctgtttagcggtcaaagtggaacttcaacaggctttctatcagttgcctgacgatatgctcctgcatatccgtgttaatctgtccgtccattttcgcacaagagcggatatatcccgcataatgggataggacggcggcaacagcttccgggtcgccctcgcttgccttaacgattgtctcatagggaagtagctggctcataggacaaaccctccaactctgcccgtagccgccgtaaaatcatctgaatacgccgcccggttgtgttgccagcccgtccatatctccgtccaatctccctatgcgtcaatcgttgaaagtagtacaagaaaatgatttcctgttccatctgtgatagtgcggacagggctgcggcaagctctgggctttccaaaagcaccatctgaccacagacgaaaagcggatagctggtcatgccggattgctccgcaaagtatttatctgtggtactgaatggatagtgtttttcttctatcagatattcaagcgagatttcccgcttgcggcggctccgtatgctccgggctgcgtctatggcagcgtggcgaataacagtcttgcaaaaggcatcgtgtgtatgccggatatgttcttgatacttttcgtgttcggtcatggaaaatccccctttctgaataatggcagagggcggcagcatcttgtgctgtcgccctcttgattaccgaacagcaaagacgggcggggctgtcaacggcggcgcatttgcgccgttcatcttgaccgttgacaggctcggctgggtttgctatctgctcacggcaattcactctcattgataggaattgcctcaagttccgtattcaaattgttccaataagagccaatatccgcacttgtgaaatacttaaaaccgcctgctgctgacttcaattcgccgtttttaaccccatagcaggcgtaaatcaaatcgtagcttgttccatctgagaggttaaatctaaagctggtcacatctgctccggcagtttcctcagtcgttttgtcttttagggataagcccttgaacttatcatacagggtctttatatcattttcagcaacaactactttcttttctgctgatgcaggcactccgtcatagtggtacatttcaacgttttcgacatcttcaacctcaaatgggaagtcgattttgacaggctcataagcaatgtttataggtaacagaaagagagctgtaaaaattgcaatggtacaaagagcgatggaaacgagaacagcaatcgttatcttttttctgcctctctgcttttcttttgcctcatggcgcataataacgctttcgctttcttcgtgaagaacatcttcgctcgtgtgagaaagcaatttctgataaattgcgttacagtcagcacaggcgttcaaatgctcttttaccatctctgcgcttgcttcgctgcaagcaccgtcaacatacagcggaagaatatctcgaacaatatcgcattgtttactcatgcttttcatccatcctttcttgaatttttagctttgcacgatgataagtaactctcgcccatgattctgtttttccaaaaattgcagcgatttgtgaaaaagatagttccccgaatacgcgaagctgaaagacttctttgtatggttcttccaaacggtgaagaacgaggtgtatgcggaacgccatgtcagaatctgcaactgagttctcaacattttcatttgatggcaagtcattgatttcactcacatcagctactcgctgacggcttcgcatttcatcatggtaaaggttttttgctatggagcagagccatgtcaattcatctgacttacctttgaattgtgatgttgtagaaacagccttatagaatgtgttctgcgcgatttcctctgctatctcacgatttttggcaagagaaatagtatacgagtatacctgtaaatagtaggctttatagagcttttcatagtccatacttgtcatcacctccttcagcttcataggttagacggagaaatcggaatttcgttacaaagaagtttgaaatttttatacctttacgctactcttgctttgtgcggactattggtagacgcgcattaacggcaagtaaagagattgctgtgtcagcttgatatgttcaaatgctaattaagtatagcatacagctataaatttttctattgcgttcccctgacttcggaatagtggcagggctggctatccttgttttgctttgtgcttctctaccgtacatgagcatttgcacctgggttgtcgttgccatacccctccatgaggttaatgccgccccaaatgccaagtcctgcgccaagcgcgataaccaaagtctgcaatacgtcaactgcgctgttgaaaaactccatagaaacctcgctttctgccgctgtgcggctcaaaaaatgttatggaaaatgaaaatgccgccgttattcctcggcggctgtgtcctcgtcggacaaatctatttcgtatatgtcaaaggcttcatcgggctttacgattgccggacgggtagacatataccgttccacgtcaaaagcgtttttcttgtcgaagtcggaaaggtatttgtagtttgggtgtttcgttatatcgtatttgtcgcttaaaaagggacgtacaccgcgtagctgcaaaatacatttcccaccgtccataactgctatttcgtcctgtgtcatcaactcctttcctaatttttgataagtaagtccatgagaaacctgcgtgccgcgattttcggaagtgttgaaactgtcgattgtttcccgtcccaagttatccgaaatatcctttgcatttttcccacgtcctcccaaaaacaaggtgctgtcggcattatcaagtatgatttctgccgcgtccttgtaaatggcttttagctggctctgcgattgcagaatgatagaagcggacatttccctgctgcggattgtggcaatcagtttatcaaatcggggtatctgtccgatgttcgcaaactcatcaagcaaaaagcggacatgaacaggcaatttgccgttgtattcgtcgtccgctttatcacaaagcaaattgaaaagctgcgattgcaaaatagcgataacaaaattaaaggtgtcgtcggtatcgctcattatgaggaaaagcgcggttttcctgtcgcccaatgtatcaagttccaattcatcataggacatgagttcccggagttcctctatatcaaaaggggcaagacgcgcaccgcaagaaataaggattgactttgccgttttgcccgccgccaatttgtattttttatattgcttcaccgcgaaatggtcggggctgcgttcttccaaatcggcaaagagcagatcaacggggctttggtattcctcgtcgtcctcgcgtgcttcgcttgcattgataagttcaagcagcgttgtaaagttcatttcctcggcgggggcttcataccaaatgtagccgatcaacgcgcaatataataacctctcggctttcacccaaaaatcttccgcgcttttttctccctcgcctttggtattgacaataagggtattgacaacctttaacacgtccttttcgctgcggatatagacaaacgggttatagtgcatacttttccgaaagtttatcgtattcagtaccttaatgcggtagcctgcccgttgcagcagctttccgcactcgattaggacggtgcctttcgggtctgtcaagacataggaagaatgaagttgcattaaattaggctttacgaaaaaccttgtttttccgctgccgctgccgccgatcaccacgacgtttttatttctcgcgtatttcggctgcttcgggcggctgttcatggtaagccgttcggtctgcgtcaaaatgatgttgttctgaaaatccgggtcgatatagggctttatatcttcggcgttgccccaacgtgcgctgccgtattctgcgcccttgcggtatttcttcgcgtttttccctttgacatagacaatcagacggataaccaccgcaccgacaatgccgataagcaaatccagcgggtgaacgctcggcaaggcatttgaaaacgcttcggaaaatccctgtgtgatattgagtatcttttcggaaatatccgcgccgggggcaagccgcaccgcctgtcccaccttatcaaagagatagacaaagaacacataggggatattcgggattatcagctttttgtagtttatctgcttcatatctcgcgccccctgtctattttctttaccttgtcgcgggcggcgttaagctgcttcgccttgtcctttgctgcggcaagggctttgcggatagagggctttttatccctaatcagcttctttgcggaaaactcttgaaacgctgcggtcataacgtccgcgtccctgcctttgaaaaacacaaggtaacgggtctgttcgcccttaacctttttcaaagaaaaatctatgttgtacttcttcgcggtactctcaaaggctttgatattgctgtcggtgatctcgatgttggaaacacccgcattttgcttcataagctgccgcatggtctgtttcccatgcggggctttgcttttctgctccaaaaacttttggattgctttctgcaacgcctgttcggtaagccttgccgcgccttttcccacgttgacggatagggcaatcgttttttgggttacttcctcctgcaaggtatcaactcctttcccggtaaactgcggctatgctcatttgctgccgtaaaagtcgtgattgacaagggcggtatagtagctgtcaatggtactcggcgcgttgaacagcaccgctttaagatactgcttgatgttgcggattttggttgtgttctccctcatgcagtccaaaacaaactcaacgtggctgctgttcagcttcataaactttgatttgacaagttcggcggggtagtcgtccccggcgatacggattgtctttcgggctgtgcagacggtttccagcatgatttctacaatctcgtccaaacggtctttatccattttggggtcttgaatgagaatgtcatagtcgatgttgtctttgatgatttcccgataaatctctattgcgctgtttgttttcgcttccgttcttttcctttccggcggcgtagccgcttcgtcctgctcataaggcaggggatttagggaatggaaaggaatggaatgggtacttgatagatcagtaattgattgttctttacttgatatatctttatttaattgcgttggattttccaacgtaggtttttcctgcgtaggtttttccaacgttggattatccaatgttggattttccaatgtaggtaaatccgatgtaggcggctgttcactgctggtagctgcttccggctctttgggctgcggctgctcatatatgacataatccgcaccgcgcaaacgtcctttctcgtcgcgttcccggctgcggacgatatatccggctttttcaagttctttgaccgcttcgcggattgcgtcgatcttctcccggttgatgtgagataagcccgcaagggtataatcccaatcttcgggtaaggacagcatttgcgaaagcaagccttttgcctttaaggtgagttccttattgcgcaagtggtggttgctcataacggtatagcccgtatttctctcaactcgaaaaactgccatttttttatcacttcctttctcggtctgcgtggaatattagaaagccgttttcggcggttttggtattgcagtatgcctttgctgtttttacgtctgaaaagccttgtattataagggctttttcgcgcctaacgttccacgttaccgcctgttttcgggcataaaaaaaccgcaactcttttcaagctgcggcgacatatcctactcacttaaaaacgccatatcaaggcttgtccaaccttgctacggcgttttaggtgtaattatagggggtgtttaattgtctttaatgtgctgaaagccgcatggttacggcattttccttgttgtgcatatattgacggggcagttgcaccggtcgggcctgccgcaccggttgcacccgccgcgccggtagcgccggcagcgcctgtggcacccgtagcgcctgcggggccggctatgcctgttgcgcccgtagcgcccacggcgcccgcggggcctgtggcgcctgtggcacccgtagcgcctgtggcgcccgtaatgcctgcggggccagtcgcgcccgtggcacccgtagcaccggcgatccctgcggggcctgtggcacccgtagcgcctgtagcgcccgtggcgcccgtagcacctgtggcgccggtcaggcctgtcgcaccggtcgggccggtcgcgcctgcgggaccctcaacgccctgtataccctgcacgccctgcgggcccgtagcacccgtagcgccgcgcggcccggtcgggccctgtgcgcagcagcacggcgtgcacccgcaggtgctgcacccgccgcagccgcggggggcgctggggcaggtgtcccagtcgtcgttcggtcgataaattttcatgcggaaaaatcccctttcattccgttcacattgcgctgtgtggtggcctccacaagacagaatatgcggacaggcccgaaagggtgccagtcaggccggcattgcggagataaaaacagggcgctttcgcggccttatgatttctgaccggactgctccaaaaaatcgatgtacttttccccgaagccgtgcaggctttgcagcgtggggagaaacgcctttccaatatcgctcaaagcgtattccacctttgggggaacctgcgggtactcggtgcggacgatcaggccgtagtactccagctgtttcaactgcttggaaagggttgcgtgcgtcatttccggcatcattttcagcagtgtattgaaccggatcggcttttcacttaaataatgcaggatcaaaatggaccattttccctgaatgaccttttgcgccgtgacataagggcactttccgtataaatcttgcgacatcggtgcgatcctcctctatagtatgctgtaagatactaagtattaaaaaatatcgtacttgataaataagtcgtttatgctatgattatagcacaagaaaaataaaaagcaagaacaaggaggacgcctgtgatgcgtaagatcgaagagattgaaaattttctgcgtgaaacccccgttttttatctggcgacaatcgatgaaaaccgaccgaaatgccggccgatagggttccacttgctgcgcggtgcgcacatttattttggcgtgggaacctttaaggacgtgtataagcagctgatgaaaaatccgtatgcggaaatctgcgcctgtaaaggagcgcggtttttgcggtactatggaagagcggtgtttgagacagacgacgcaatcgcaaaagctgtgttggaaaattctcccaacctgcaaaagatctacaacgagcaaacggggtaccggcttggcattttccacctcgaagaagcaaaggcggagtttcacaggatggcggagttggaaagcgtgatccagcttcagtgacgaaaaaaaccggcgggccagaagcctgccggtttgctctttttataaagttttagatgtttttcgggaattcgcgctccggctgaatcgccttgtaggccgggcggatgatcttgcccgcgttgatcagctcctcgatgcggtgcgcgctccagcccgcgatgcgcgcgcaggcgaagatcggcgtgtaaagctccatcggcaggtcgagcatgctgtaaatgaagccgctgtagaaatcgacgtttgcggaaacgcccttgtagatgcggcgcttctcgccgataacctccggcgcgaggcgcgcgacgcgcatgtacaggttgtattcgtcctcgcggcccttttcggaggaaaggccggcggcaaagctctccatgattttcgcgcgggggtcggagatcgagtagaccgcgtggcccatgccgtagatgaggccggccttgtcgaaggcctccttatcgagcaggcgggagaggtagaggcggatctcgtcctcgtcgtcccagttcttgacggtctgcttcatgtcctcgaacatgcgcacgaccttgatgttcgcgccgccgtgcttcgggcccttcagcgagccgagcgccgccgcgatcgcggaatatgtatcggtgcccgaggaggtgacgacgtgcgtcgtaaaggtcgagttgttgccgccgccgtgctcggcatgcagcatgagggcgatgtcgagcaccttcgcctcgagcggggtgaactgcttatccgagcgcaggacgcgcagaatattctcggcggtcgtcagctcgggcttcggctggtggatgtagaggctgcggccgtcgctgtagtggcggtaggcctgatagccgtacaccgagagcagcgggaaaatcgcgatgagctgcaggcactggcgcagcacgttcggaaccgaaacgtcgtcgggcgtgtcgtcgtaggagtacatcgtcagcacactgcgcgcgagcgtgttcatcatgtcgccgcttggcgctttcatgatgatgtcgcgcacgaaattcgtcggcagcgtgcggtagaacgagagctggccgatgaacaggtcgagctgctccttcgtcggcagctcgccgaaaagcagcagatacgccgtcatctcaaagccgaagctgtggtcggcgggcatgctgcgcacgagatcctcgatattatagccgcggtagaagagctggccctcggcggggacgctctcgccgtcaacgattttgctggagcggatttctgaaatgccggtcaaaccggtcaggacgccgttgccgttcaggtcgcgcaggccgcgcttgacgtcgtattttgtgtaaagtgtggggtctatggtgccgttctgcgtgcagaaggaggcgagtgtctggatttcgggcgtaatctccgagtatttcgatacgggcattcttaaaccatcctttctctctggcccaaaacgggccgccgcgttcgtaacaattcatcatacaatttattatagcagaaaacaaaagtgttttgatgtcgaatctatgaattttttataagattggaatcggaaactttgcaggttgtatgattttttcggcccgatccggcaggcataccgccgtccccggcgccatacacatggtagaaggacgaaagagagggatgccggaatatgaaacggaaacgaatcgcggttcaagcggtatggatgcggaaaacagcgtggacggcgtgcgcggcggctgccgttgcgctctgcacgtggtgcatggcggacaatcttctgccggtccttcggcagagcggcggcgcgtgggcgctgcgtgcggcagggctgaaggtctcggcggaaacggcggatgaggcgctgccaaaggaaagcggcgcggcttccgccggtgaagcagtgccggagacgcccgaagcggaggcggacggcatcctctccccgtgggcggagccggagccggaggtcgtgccgacgccggacccggagcgggagaccgcgcccgtcgcatcgacctggatgggcggcggcgaggaggtggccggcttctcggtcaaggacacgtcggaatcaggcgtcgatctcgccgaggagctgcaaatcgacccggacgtgcacgtgaagcgcgacggctcgccggtggttttgctctattcgacgcattcgagcgaatcgtttctgctgagcgatacggactggtactacaccgacgacgatttccgctcgacggatccggacgagagcgtgctctcggtagcggcggaggccgcgaaggtcatcgaggcgggcggcttcggcgtcatccacgacaccacgatgcacgactacccggcgtattccggcagctatgaccgctcgatggagacgatccagaaaaacctcgccgaatacccgacgatccagatcaccgtggacgtgcaccgcgatgcgttcggcgaggaggaggacggcacgcgctacaagccggtcgccgaggtggacggcgaagatgcggcgcagatcatgattctcgcgggctgcgacctttcggaggacccgctctttcccgactggcgggaaaacctgcatctggcgctgcggcttcagcagaagggggagtcgctgtttcccgggctttaccgcccgctgtttttttcacagcgcaactacaacatgcacgcctcgcacgggtcgatcctcgtggaggtcggcaccgaagtgaacacaatcaaggaggtgcggtattccgggcggctgctcggcgaaacgattctcgcggttttaaacgatctcgcggaataggcggggcggcaggcgggcatactcggtacagaaaacaaagataaggggttctgtgccatgcaaagccgtttccgcgcccgcccgtttgtgatttcctttctctgcaccgcgctcgcgctcgtttttctgaccgccatgctcgtcgtcgacgccgagggccgccgcctgagcttcaacgatacctcgcccgcgctggagattgtctacaacgcggacggcacggcggacatgcaggtgaacgcgttccggctcgaccggcagatcaacgtgacgggtatcgtgaaggcgtggcattttgtcgccgattttttctgcatcccgcacgggcgcttcccctcgggcggcggctgaggcgggcgcggcacagccgtccgtggaaaagcggcggggaggccgggcgcaaagctgcgcggcctccccgcaaaatcattcgatggtgacggtgcgctcggcggtataaaggtgcgtgatgaaaaacgactggatcgtgtcgcggtcgccgccgaacacagcggtctcgctgccgggcgtgtactgtacataaatggggtcaaagccgtagtcggtgtggggaatcccggaattcatgcggatcgtatagctgccgtcgccgctgccggttacagtcagcgaaacataatagccggggccgccgaggccctcgctcttgctcacgcagaggcggccgtccacgtcctgtgcaaagatgtcggcgagcagggcctccgccgtgtcgtgctcaaaatagcgttcggccgctgcgagcagcgcggcgcggtcggggatgtctgccacagccgtgggataaaccaagggggttccatcctcgctgtagggcgggtattcggtgaagtcgctgtaggccgggtcgatcacggcgctgcggtcgtaaaaccagtcgcagaaaaatgaggccgcctcgtcgatgtcggcaagcagcgcggcttcggtcaggggcgcgggcgcggcggtggcctccggcgtgggctccacagtcggcgccgcggtcggttcggcggatggttcggcggtcggcgcaggcgttggggctgccgtcggctcggttctggaatttttcagaacggcggataaggtggcgcagcccgccgtgcagagcagcataccggaaagcagcagcgccgcggcggcccgcgcccatttctttgcggtcattttaaggacttcctttcgtttctaaaggtggattttcaaagctgctttcagtataacagacgaaaaaagcgttggcaatacgcggcgggcgcgcatttttcctaagaaagttgaggaatatgaaaaagttcgtgattttttaacaaatttatagtatagttaaacacatatagaatcagggggcgcggggtgcgcccgaaatgagaagaggttgaatgtaaaatggcaaagaaacagtttaaggcggaatcgaagcgtttgctcgacctgatgatcaactcgatctatacgcacaaggaaattttcctgcgcgagctgatttcgaacgcgagcgacgcgattgacaagctctattataagtccctcggcgacggcgacacgggcctgaaccgcgacgatttcgaaatccgcatcgaggcggacaaggacgcgcgcgtgctgcgcatccgcgacaacggcatcggcatgacgcaggacgagctcgaccagaacctcggcgtcatcgcaaagagcggctcgctcaagtttaaatctgaaaacgagcggaacgaggacatcgacatcatcggccagttcggcgtcggcttctactcggcgttcatggtcagcgaccacgtgcgcgtcgagacgaaggcgtacggctcggacgaggccttcgcgtgggagtcggacggtgcggacggctacacgatccgcgcctgcgagaaagcggggcacggcaccgagatcacgctgcacatcaaggcggacacggaggatgagaagtacggcgagttcctcgatacataccgcatccgcagcctcgtgacgaagtattccgattacatccgctacccgatccgcatggaggtcgaaaagacccgcgcgaaggagggggccgaaaacgagtacgagcactatttcgaggtggaaacgctcaacagcatggtgccgctgtggaagaagaacaaaaacgagattacgcccgaggagtacaacagcttctacaaggagaagttctacgactggcaggacccgctcaaggtcatccacacggcggccgagggcaccgcgacctacaacgcgctgctgttcatcccggcgaaggcgccgatggactattactcccgcgattatgaaaagggcctccagctctacgcctccggcgttctgatcatggagaagtgcgccgacctgctgcccgattacttcggctttgtcaagggcctcgtcgattcgcaggacctctcgctcaacatctcgcgcgagatgctccagcacgaccgccagctcaagctgatcgccggccgcatcgagaagaagatcacgtcggagctcaaatccatgtgcgagcacgaccgcgagacatacgagaagtttttcgagagcttcggcctgcgcctcaaattcggcatgtatgaaaactacggcgtgaacaaggataagctcaaggacctcgtgctgttcaagacctccgccggcaagatgcgcacgctcaaggagtacgtcgccgacatgaaggaggaccagacctgcatctactacgcctcgggcgaaacggcggagcgcatcgcgcgcctgccgcagaccgaagcagtgctcgaccgcggcttcgaggttctgtatttgaccgacgacgtcgatgagtttgcgctgatggtgctccacgagtacgagggcaaggaattcaaaaacgtttccgccgaggacgcgcgcgtccagtccgacgaggagaaggccgcgtccgaaaagcgcgcggaggagaataagacgctgctcgagaaaatcaaggcggttctcggcgagcgcgtcaaggacgtgcgcctctccgcatcgctcaagagccacccggtctgcatcacgacggacggcgcgctctcaatggagatggaaaaggtgctcaattcgatgcccggcgcggagcagaaggtgaaggccgagcagattctcgagatcaacgccgagcacccggtctttgagacgctccgccgctttgagggcgacgaggacaagctgaagaaatacaccgaggtgctctacaatcaggctctcctgatcgagggccgctcgatcgaggacccggtcgcatacgcgaacgcagtggctgagctgctcgcgcagtaaagcgcgcagtatacgaggaggacaggagatgaaacggcagaaaaaggaacggaactggggcaaaatctttacgatcgcagtgcttttgagcttcatggcgccgatcgggtatctggtcgtgcggatcatatcgggcgatacggcggacggcgtgggccgcggccgcgaggactacgtgctcatgcttttgcagtgcctgctcggcatcgcggcgatcctcgtcccgatccgcctgatgcgccgctgggacatagagatcccgcgcgtgatgtttctcctctacatcggctttctgtactgcgcgatctttctcggcgaggtgcgcagcttctactacattgtgccgcactgggacacgatcctgcacgcgtgcagcggcgtgatgctcggcgcgctcggcttctcgatgatcgcgatcttcaataataccgagcgcatcccgctgaatctctcgccattcttcatcgccgcgtttgcattctgcttcgcgctcgcgatgggcgcgctttgggagatctacgagttttcggccgacgccctgttcggcacgaacatgcagaaatttgcgctggatgacggcacgccgctcgtcggccaagcggcgctcaaggacacgatgaaggacatcatcgtcgatacgctcggcgcgctggtgatgagcgtcgtcggctatatctccctgaagtacaaaaagggctggatcgaaaagctgatgatccgcatcgggcacggaaggcgcagagcagaaaagaaataagccgcggcggcgcggcgcgcagaaaggaagacccccctatgaatctgaaccagacgccgtacggcgtatatccgcagcagcccggcatgtatatggagccgccgtgtgcagaccccgtggagctcgagcagaaggcgcttcgacgcgcgtcgtcgcggcttgcgtttgccgcgctcgccgggctgccgctgcaatacgttgtcatcaatatggcggcgttcgttctcgcgctctgcggtgcgaatctttgggcgcccgccggaaacacgatcggcggcctgcccgcgacggcctattatctcgtggcggcgctgacctcgtatttttcaatcgcgctgccgtttgcggtgtttcttgcggcgggcaggcaccgcctcagcgatacggttctcgtcgaaaagaccggcgccgtaaacggcgttctgctcgtgctggccggcgttttcctctgctttgtgatgaatatcccggcgaacctgctctccatgctgctcgagggtctcggcctgaacggcgccgtgaataccgagcggtacaccgtgacctctgcgccggagctgatcacgatgctgcttgcggtcgttctggtcgcgcccatcacggaggaatttgcgttccgcggcgttatgacgtcggttctgcgccgctggggggactggccggcgatcctcttctcggggctgatcttcggcatggtgcactacagcttccagagcctgcccgtcgtgctggccggcggctttgtgatggcgtttctctacgtgcgcacgaagaacatatggatcaacatcgccgtgcatttcacgaacaatttggtcgccatgctgcccgccgccgtcaactacctgttcggcgcgcgtgcggcggacgccgtcagcctgatttcgttttacgccgtcgttctcatcggcctcgcggcgctcgtgattttgctcgtgcggcaggccatgggccgcagggcgttcagcgcgccgatgcagcgcggcaagctcgcccggagcaagccgttttatatgctcgtgaaccccggcttcatcgtatacgccgtcgtgttcgtcgcgatgtgcgtggtggggctctatgcggcctgaggccgcggggcgggaatttctgccggagcgccggttcatggaggaggcgctccggcttgcctgtgaggcggccgcggcaggggagatccctgtcggcgcggtggttgtcaaggacggcgcggtgatcggccgcgggcgcaaccggcgcgaggcggcgcgcagcgtgctcgggcacgccgagcttgaggcgatggagcaggcggcggaagcgctcggcgactggcggctttcgggctgcacgctgtacgtgacgctagagccctgcccgatgtgcgcgggcgcggccgtaaacgcacgcgtcgaacgcatcgtctacggcgccgaggacgaggtgatgggcgcatgcggaacggcggtttccgtgatccgcctgccgcgggcgttccgccccgcgctgtataagggcctgctcgccgaagaatgcggcgccctcctgcgccggttctttgcggagcgcagaaagtaaatgggagcgccggtgcggaaagtgcacgggcgcttttcgcgccgcctgtgccgagcgcattcgctttttaccgtgtcgcatgcagcggaaaatttttcgttttttcttgacagaggcggcaaaaaggtatatagtatgaaatataaagctgtataaattgtgcgaaatgcggctttatatatcgcttacatgaagaaatcaatcctttcagctaaaagaaggcggacgcaagttctgctgttctttgtgctggaaggatttttttgtttataattttatggatggaggcagtattttgaagctgacaacagagctggagaaaagaattgaccggtgggtggacgagcacatagagcgcttggcggaggatacctgcaagctgatccgcatcgaaagtgtgtccgataaaacgagcgatgtaaagccctttggacagggctgccgggacgcgctcgcgaagtacatcgagctcggagaggcctacggcctaaaagcgcacaattacgagaactacgtggcgaagctgttcgtcccggaaaatcgtggaaaggccaagcagatcggtctcatggggcatttggatgtggttcccgcgggggagaactggatatacccgccgtacaaggggattataaagggcgattggatcatcggccgcgggtcgcaggacaacaaggggccctgccttgcggcgatgtatgcagtgctttgtctgcgggatctgggaattgacctgcaatacgacgtctgtgcgctggccggcgccgatgaggaagccggcatggcggatgcggagtattacgcgcggcagccggatataccggacctgatcctcgtcacagacagcggctttcccatctgctacggggagcgcgggatcgcgcgcggctggctgaaatcccgccgccgcttgtccgaaaatatagtggatctccatgggggaagcgcagtcaaccagattccggatacggcggagatcgcgctgcggatgacgccgtcgctcaaggaaaggtggaaagccgcgccctcgctcgaagcgcggcaggcgggggaaacgctggtggtgacggggcgcggaagagccgggcacatcgcctcgtcccgtgaaacggagaacgccgtcggcgtgctgctcagaacggtgcttgaagcgggcctgctggaggaccctgcggatgcggagatccttagcgcggccgaaaagatgatcagcagccgctgcggggaggtgttccggctttcggacgcggcagaggtgcgggatgtgcgctgcggctgcggcatagcggggctggaggacggcgcgctgaagttctcgttcaacctgcgctgcccggtctctctcgatgaaaggcgggtgctggatcaagtcgtacgctatggcgagcaggccgggttcgagcccgtggaggccggcgttctgccctccaattattttccgaaggagcggccggtcattcagatactgaaccgcgtgttcaacgcggtgacgggcttggcgctcgagccgcaggtttttgcggcgggcacgcatgcccgaaagctgcccaatgcggtggcctacggccccggcataccggagccgtcgtattacccggggaaagaggcgctgttcccgcaggggcacggcgactgccacatgcccgatgaggcgcagtcgattcccgcactgaaagaggccctgcgcatctacatccggggtgtgatcgcgctcgacggcgaggtgctgacgaaaggagaggccacatgaacatggaggaccgcctttcccgggcgcaggcatttttgaagagcgggcagggcatgctgctcacggcgccttggcaccgcagattcctgctgaaatttccctcgtcggcaggcacaatattcctcacggcggaaaggcgctttttcattgtggatttccggtatatcgaggcggcgcgcggcatcgggaacggctttgaagtgattttgcaggaggagcttgccgtgcagcttcgggcgctggcaaaggaaaacggtgtcacagcggttctgaccgacgcaaaggcgctgtcctttgaggaactcgaggcgcttcgccggcttttcgaacgggattgtttgaaggccagcggcaggctgaccgatttcttgggcgcgctggcgcaggaggaaacggaggaggaaaatcggtgcgcggaacggatccgcgcgattgccgagcgggtggaaaagcgctttgcgcgctttgtgcgcgcgggcgcatcactggagggcctgaagcggaagctggggcagatcagaggggaggagggcgacgaaagccgcacctttgccgcggaatttgccgtgcagagtggaaaagcggaagcctgcgtggcagagggcgttctccctgccggcagcacgctctgcgtccggtttgcgctggaggcgggccttgtatcccgcgggcaggcgatgcgctttcccgtgaaggcgctgcccgccgtgccggtgcaaagccgccgggcagccctttgtgcgctgctgtgggaggaaaacagcgccgtgctgctctgcggccgccccagcatccgctattatatcggggccgatccggggccggaatcgcagcttctcctcacgcattcggagatactgctttttagccggcggcggccggcggtttcggggataaccgttctgcccggagattttgagggaatgcctgcaaaggccgcggcatatctggaggcggccgtgcgagcggcgggcgtccgaaaaatctacgcggagccggatattccgatgaaagcgctgggcgtttggcgcgggctgccctgcccggtggttccgagccgtgcgctggaagaaaggatttacagccggagaagcgtgaaaagggaagaggagctcgcgcacattcgtgcggcgcaggacgtcacggaccgcgtctttctcgaagcgctcaattacatccatgcggggatgacggacatcgagattcagcggatggtcggcatgctgttttatgagatgggctcgcagatggattccttcgaccacgtgtgcggctgcggcccggataccgccaagccgcacgtaaagccgacgggacgcgcggcccggcgcggcgatttcgtcatgctggatatcggcgccagtgtggacggctatggctccgatatgacgcgcatggtcggcatagacgcggtcgatgcggagaagcaggagatctacaatctggttctcgaggcgcagaacgcgggcatacaggcggcccgcgcaggcgcggtctgctgtgcggtggacggcgccgcgcggcagcggatcagcgacggcggcttcgggccgtatttcctgcacggcctcgggcaccccgtcgggtgcggagggaaagaggggccgcggttcagccagagcgacacaagcgtgcttcgccccggcgttgtgatgacggtggagcccggtatttacctgcccgggcggttcggcgtgcggattgaggatatggtgtacataggcgagcaaggcaccgagaatctaacgcacagcccaaagacgctgccgtgcgttaagtaaatccgtccgccgcaggggaacgggggaggcaaggcgtttccggcaaaaaatcgacgggcgcgttccccttgcgaattggatgcttttatgttaagattttattcatattcaacaatctgcgggagggatggcagtgcgtttatgttctttaaagacaaccttttccaagatgatcgtctcctatctcatggttctggtggttccgctgatttttggcatttcgctctatgcgacgacgctcggcattacgaggcgaaatgttgaggaagcgaatttgtctgttttgaataacgtgcgggacagcgtgaacatcagcctttcgggcatcagcagcatgatgcgcgctttgctgagcgacggcaatattacggcactgtcgaacaaagaccagtatgcggccgaggattataaggcgatggatgagatccagagcaccctctctatgtcactgctttcgaacgcttatatcgacgacatcctcatctacttccacaaggcggattttattttgagcagcaaaagctacttgggccggctcgggagcatgtcggggtattcctctacggtcgggctggatgtcacggattttgcggagcagatcggcggcgccgaggcctacagcctccgtctggtggcttccaatcacggcacggcggcgtttatcaccgcccccggcacctcgatcagcgggaaaaataacgtcgtttcagttttggtgcgcctgaaaaccggactgcttgaggagatgatcgtttcggacgactgccgcaccttccttgtggacgcctccggcaatacgttttcaggcgaggcgggcgtccggctttcaggggagagcggcgcatggacgctggaaaggacgcagagtgcggcggaaaacagccggtgcatcgaaacggaggatacggtttttcagatccgctacgtccggttcgtcccggcagagatctattacaggagcttttctacggtatgcctgctgttctttgcgtttttggcgctgtgcctcggcggcgggcttccgctcgccgtttccaccgcccgaagaagctaccaccccgtgcgggagatcctgtcgctgatcccccagccgggcgacgatcaggattcggatgattacatggtcattcgatcctctctgaccggactgcttcaaaaaaccgaggactatgaggtggagcgcgacaaccgggctctggcgctgcggagctatctgctatttcgccttttgaacccttcggatttgcaggaggccgattttctggaggtatgccggaaatgtgagattacctttgaaaacaccagctttctgctcatagggttttccgtggaaaacggcagcaatctctttttcaagcagaatgaaagcgtcgacgagggcgtgtccaatttcctcgtggtggcgatcaccaatgttctccgcaccgctttcacgggggactacaaatttttcacggcggcgtataagggcgtttactacgcggtcgtcaatgtaaattccagactggataaagaggtggtgctggatgagatcaagaaaagctgcctgctggcggccggtcggctcgacgccgatttccgggctatcgtttcgatagcggtcagcaatgtccacaccggttacctgaagatccgccgctgctatgaggaggtggaggaggtgctccggcagcaaaacgccctgaagcattccgcctatgtgacgcagcaccgggagctggcgctcatcaagcaaaaggcggaggccggtgcttcgccgcgcgctgcggcgccgaaccccaaaaaggacgggaaaaaatgggtgaatgtcgaggagatcaaggcgtatatcgacagccactacacggcgccggatctgacggtgggggcgctctccgaccggttccatatgacggcggcgaacctctcgctcctgttcaagcggaagctgggtgtttccccgctggaatacatccagatcaagcgggtcagcgaggcaaaatgccttttagaagccacgcagatgaaggtttcggatattgccaagagcgtgggctactatgactcgcgcccgctcatccgggcttttcggcggatagagggggtcaatcccgcggagtaccgcgatcagaaaaagaatgtgtaagcgctgtatcgatgggcttgctttccatacggggagctggccctcttttctttgtgcgccgggccacaatttaaaagggaaactgccgtttttttatgaagccgtgcgcccgcgcgccggtttttgttaaatattgacgcattttattcaaaatttccgcccgatgcgtgcaaaactgcactttacggaataacttgggtggtttgcatacattaaattctggctatttattaaaactgtggaatatgttagtgtggggacaggctgaaacgattgattctcaaaatgtaagcgagcacaaattgcaggaagggaggggaaatgggttcggctgagccggttcgccggcaggacagtttctttcgctgaaaaaagatgaaagacgaaagatgaaaaaatccgactgagttttgaaaggatgggagaagtaaccatgaaaaagtgctttctgaaaatttgctgcggccttcttgcgcttgccgtgctggccgggtgcagcagcaccccgggcggcgcctccggcgcggattccagcgctgccggcacgtcggaaaacagcgcggacatgagcggcgcagaaccgctttccgagcagacgctgccgatttccgatgagaaggtgacgctcacctactggagggtgtggtcgaacgactacacgcccgatttcaacgcatatcaggtcaacgaggagatggaggaaaagaccaatgtgaaaattgaatttacgacggtggcctcatccatcgcaaaggaaaaattcggcattctgctggcttcgcaggatctgcccgatatgatcgagaacaatgtggcgtatccgggcggcggcgagaaggcgatcagcgacggcgtctacatcgatatggcgccctatgtcgagacctatatgccgaattaccgcgcgctgcgggaatcggacgaaaccgtgcggaagatgacgatctccgatacgggcaagatgtggggcatttaccccctgttctgcgacaacgacaagacgctttgcgccgagccctcgtggatcggcatggtcatccggcaggactggctcgacgatctgaagctggagcagccccatacgattgacgaatggcacacggttctgaccgcgttcaaagaggaaaagggcgccgaagcgccgctgctgctctcgaaaaccggcataatgccgtacgattacttcctctcggcctacggcgtgaaatccgaattctacaaggacggcgataccgtgaaatacgggccgatcgaggagggctaccggcagtatttggagctgatggcgcagtggtatgccgagggtctggtggaccagaactttatctcgaatgaaatcacgagcaatgcgccgaaggattacattgccacgggaaaatccggcgccgcgacctattcctgggccggcacgggaaactacctgtacgagacgggcagcagcacggatccggatatcaactggcagccgattacgggccccgtgctgaaggagggcgatacgtgtgaggccagaaatgtcagctatatcgcaattcaaacgccggtttcagtgacgacagcctgtgaatacccggaaatcgccgcaaaatggctggattaccagtacacgcaggacggctttatcgcaaacagcttcggcgattcggaatgctacacggtggatgacggcggaaactacgcgtttaccgacaagattatgaacggcgagcacgggatcgacccgcagaacgagcagttctgctaccgccgcaaggatttcccggggcttgtgagctgggaggtctatgatttgaccaatcccgcggagcgtctggccgcaagagaggtgtacgattccgacggcacggcgctggtgctgcccaagatcgagatgacggacgccgagggagacgagtacaacgctttgtatacggacatccagacgtatgtgcaggagaaaacggcgggctacatcatgggctccgagcctctggacacgtacggcgattttgtggagacggtcaagggcatgaatatcgaccgctgcatcgagatccagcaggctgcgctggaccgctacgacgccagatgagccgcagaaaataaagatttggacaggagatcatcatgaaattattgcgtaatatttctctggatttccggcggaataaggtgatttatttcttatgcgttcctattgtcgcgtggtatatcatctttcactatatcccaatggggggaatcgtgatctccttccaagattatacccccgcattgggccttaccggaagcccgtggatcggcctcgacaacttcacccgctttttcgggggcgagtatgcgttcaggctgattcggaacacctttatgctcagccttctagacctgatcttcaatttcccggcgccgatcctcttcgcgctgctgctcaatgaaattcacagccgtgcctttcgcaggacgattcagaccatcagctatatgccgtatttcgtctccatggtggtcatgtgcggcatcatcgtcgatttcacgcagagcggcggcctgatttctgaagcggttgcgctcataacgggcggcagggcccagaacctgctcggcaacaaggattatttccgcacgatctacacggtgtccagcatctggcaggggcttggatacggcagtattatctatttagcggccttatccggcgtgaatcaggacctgtacgaggcggcgcgcatcgacggcgcggggcggtggaagcagactatccatgtgacgctgccgtcaatctccagcacgatcgtaatcatgttcatcatgaaaatggggacgatgctgtcggtaggctccgaaaaggtgctcctgctgtattctccggcgacgtatgagacggcggatgtgatcagcacatatgtctaccgcaacggctttgaaacgtacgattacggcttcagcacggcggtggggctgttcaactccgtggtcaataccgtatttttggtttccgcaaacttcctgtgtaagaaatacacagaaacaagcctgttttaagggggagtatctatggttggaaaacggacgccgggaagaatcctgttcagcgtatgcaacgtctgcgtcatggtcgtcatcgcgctttgctgtattattcccctttggcatgtggtcatcgcatcgatcagcgacccgggtatggtggaggcgcattccggcgtcatcctctggccgctgggcaagccctcgatgaacggatacctgtatctggggaaatacccgaagatatggaggggctatgcccacacgatcggctacgtagcggcgcagtgcctgatctcctgcatactggtgctgctggccggctacgttctctcccgcaagcggttccgctaccgcaatgttatctcgggctttatcacctttaccatgctgttcaacggcggcatgatccccacctatctcgtggttcaaaagctggggctcatcgatacatacgcggccatgctgctgccgggcgccatgagcgtgttcaacatcatcatcatgaaaacctcgatcgcccagattccggacagcttggaggaatccgcccgaatggacggcgcgggcgagatgacggttctgctgcgcatcattctgcctctgtgcaaggcgacgttcgccgtgatcatcctcttcatagcggtgggaaaatggaacgagtggttctcggcgctgctctatttgaatgacgagagcaaatacccgctgcaaatggtgctgcgcgatattctgatcaacctgaccacgatcaaggcggatcggatcaccggggatatggcaaaccagcagatggagctctacaaagtgctgatgcgttactgctcgatcgtggtggcgacgctgccgatcctctgcatctacccgttcgtacagaagtattttgtcacgggcgtgatgatcggctccattaaagaatagcgcgcggatcgagcggcggggcagcggcgccaagggcatgcgcgcccgctcccggccgtttcgaaggatccgcggtaaaacggcaggagcttttatttccattgggagggacaaggttgaaacagaaggacagagaaaggctgctccgggtgatccggcaggagatttcaccggcgctcgggtgtacggagccggtggcggccgccctttgtgcggcgggcgcggcctccgttttgccgggcgcgccgcagcgcataacgctggaggccagcgagtacatcctgaaaaacgccatgaacgtcggcattcccggcacggatgcggcggggctggaagcggcctgcgctttaggcgccgccgcggcggcgccggaaaaggggcttttggttttggagggcctcacagccgcacagaaaagccttgcggaagcgctggcagcgcagggccgcataacggtctccaaggcggagacccgcgaaaaggtatatctgcgggcggtggcggaatgcggcgtgcaccggggagaagcggtcatatccggaagccacagccatttttccagtctgctgagggatgggcgcgccgttcccttggcggaaaccgcgcttgaaagcgagcggacggcggcctctgccgaggcgatgacgatcgcggagatctgggcctttattcaggaaaccgaggaggaagagctgtgctttctggaggaggtagccgccctgaacaaggcggctgccgaggaggggctcacgggcagctacggcctgcaggtggggcgcagcctcctcagcggggcgtggaacgagctgctgggggcggaccttgccggccgggcggccgcggtcgccgcggctgcggcggacgcgcggatgtccggctgtgaaaagccggtgatgagcgtggcgggcagcggcaatcaagggctgaccgcgaccctgccggtcatcgtggtggcagagcaggggccgcaggcgtttcgggaaaaaaagcgcagggcgctggcgctgagcattttggttacggtgcatgccaaggcgtttttggggaagctctccgtgctgtgcggctgctccatcgcggcggcgatcggtgtgaccgcggccgtggtttacctgtacggcggcacgctggagcaggcggaacttgggatcaagacgatgacggcggatatttccggcatgatctgcgacggggcaaagccgggctgcgcgctgaaaatcgccacgtcggtgagcgcggcgatgcgtgcggcggccatggcgtgcatgaaccgcggcgccggcgggcacgacggcattgtggagcaggatgtggaggccacactgaagaatttgggcgatctcggcacattgggaatgcgcggcacaaaccgggtgattctcgagatgctgctgaaaaagcaaaacgaaaaggagcgagctgtatgaacaaaacagaaagaatgaaggcagttttcgaaaaccgggagccggaccgcgttcccgccggcttttggtttcactacccgggggaaatgccggcggaggaaagggcgcaggcgcacgtggatctgtgccggaaaacgggcgcggacatcatcaaggtgatggacgacaatttcggccggttttttacgcagggcattcagatcacgaagccctccgactggcggaaaatccgcctgccgggaaaggactgcgcccactaccgcggcatgaccgagctgatcgggcggatcctcgaaaaggccggcggcgaggcaatggtgttccccacggtatggagccccttcaaaattgcctcgttcacgtatctctgcgcgggcggcacggatcagcagttcatggcgcattgcagggaagatcccgattccgtgctggagggcgtgaagatcctcgccgataccctgcagacgtggacccgggattatctggagcttggcagcagcggaatctattattccggccagttcagcgagccgcagcggtttgacggcgagacttgggagaagctggtcaagccctcggatctggctgtgctgggcgtcacgaaggaatttgcggagaagtacaacatcgtccacatctgcggtgaggcggaattcggcttccagtcctccccgcgccgctatgcggggtatcccggcgatctgtttaactgggacgttcaccgcacggatctgtcccttgaagcgggcagggcggtgtttcaaaagccgattctgggcggtctggacaaccacggcgttctcatcgagggcagccttgaagagatccgcgcggagacggagcggatcatccgcagcatgggaaagcgcggctttatgctgggcgcagactgtacggttcccgcttctatcgattgggcccgcctgcgggcggccgtggaagcggcggagcaggcttaaaagggggcagcggcggtgaaagaaattttgattggcggcgtgcttcgtgcgccagctgtcgcgctgggctgcatgcgcatcggcgcgctcgatgaaaaggcggcgaataccctcctgcaaacggcgctggaaaacggcgtgaacttcttcgaccatgcggatatttacggcggcggagaatcggagcgccttttcgcacgggctctgcccatgcagccgtctctgcgggaaaaagtcctcattcagtccaaatgctcgattttgcccggcgtggcctacgactgctcgaaggcgcatattttgaaatcggtggagggcagtctcaagcggctgcacacggattatctggatgtcctgctgctgcaccgcccggatgccctcgcggagccggaggaggtggcggaggccttccgcgcgctgcgggaaagcggaaaggtgcggtatttcggcgtcagcaaccacaatccgggccagattgagctgctggagcaggctctgggtgaaaagctgctgatcgaccagctgcaaatgagcgttgcgcactgcccgctcatcgatgccgggctcaatgtgaatatcgagaacgaccgggcggcggaccgcggcggagacatcctcaactactgcatgctgcacaaaatgaccgtgcaggcgtggtcgcctttccaatacggcatgtttcaggggacgttcctcgggaacgaaaaattcccggcgctcaatgccgaaatcaacgcgcttgcggaaaaatacggtgtgacgccgaatgccgtcgccgttgcgtggcttctccgccatccggcgaaaatacaggccgtcgtggggacgacgaacgcccggcgtctggaggggatctgcggggccggtgcagtcacgctcacgcggcaggaatggtacggcctctatctggcggccgggaaggcgctgccgtaatggctcccgaaaaggggaagcggaagaccggataagcgcagcgcattttgatttgcgtgcaaaaacgaaccgcccgccgcggggattttcctcgcggcgggcggtttctgttttcttaaagctgcggcacgatcgcctgaatggcgggctttaggccgcggccggggtgctcctgctggtggtagatctggccgtcgtaggcgggcaggtcattgccctccacgagcacggggccgttcggcgttatggcgacgtcccagccgacatagcgcatgcccgggcgcacctgcgcggcgcgcttgcacagccggacagcctcgttgtagtacgggatgcggaacccgatgaagctgtgcccggtatcggggtgcgcgtcgaaatactcaccggttttgtcggagagcgccggccggcggatcacgccgtccgcacagatcagggcggaaaggccgccgctcgtcgtgttgtcaacgcacgcgccgccgcggcccgtgcgcagaaaggcgtaaagcgggtgcggttcgcccttttcgtccgtcagggtgacgatgcggaccgtgttgatcgagcccgggtacacggcgcacatctccttgtgctgcgcgagcccctcctccacgaggtagagcccgcggccgatacagtcattgtaaagcgcgcgtgcgctcggcgagttttcggacgtgccggcgtcgaagcgctcgacctccagaccgccaaagccgccgggcgctttcagaaagacgacgggatggcggtgcagaaaggcgtcgagcgccttgtcgtcggcatggtgcaggtcgaggtattcgcgcccgagaaactgcgaaaacgtattgcagaaccggatcttgtcctgaaagatctcggcgtcctttggggcgttcacaagccggcacagccgccagttgtcgcgcatggtgaaaaaggtcctgcggtcgcggtgccggcggatgtgcacgaagccgaaaatatggtaatcgaaaaagccgacattgtacaggacgatgcacaggagcatgtcgagcacgatcaaaagggatggtgttctggtttcttttttcacttcgcgcacatagacgagcatgcggccaaagctgaagctgcggattcgtcgcagcaacagacgtaattttaacattttttacgaaccctctccttcatgaataggcggaaaacgactgttttccacaaaatataccctctagttaagtataaggcttaatgcggaaaaagtccagaaaaagtattacatgaaagttgcaaaaaagttgaaaaatttcttaagatttacggtttttgctctggcgcgcgcggcggctgcggtttataatagagaaaaaggggcataaaggagaggcagcgtgaaaaatactttttcacacacgatttgagcctttgccgcgacgagcaaagcggcaatcggctttgccgaccggcacaaaaaataaggaatggtgattatcatggcgattggcattgtgaaaactgcgggcggcgcggtttccggcgcggagcaaaacggcatcacggcgttctgcggcatcccctacgcggcgccgccggtgggggcgctgcgctggcgcgcgcccaagcccgcccctgcttgggagggcgtgcgggactgcacgcggtttggaaatatgtgtgtgcagaacggcgggttcgtcgggatggatgcgtttttaaaccatccgcagagcgaggactgcctgtacctgaacatctggacgccggcaaacgccgcgggcgaggacctgccggtgcatttctggattcacggcggcggctttcagggcggcctcggcgacgagccgctgtatcaggggctgccgctcgtcgagcagggggagattctcgtcacgatcaactaccgcctcggcgcgctgggctttctggcgcacccggcgctgacggcggaggatgaaaacggcgcgtgcggcaactacggtctgctcgaccagatcgcggcgctgcgctgggtgaaaaggaacatccgcgcgttcggcggcgacccgaaccgcatcgcgatcgccgggcagtctgcgggcgcgatgagcgtcgcggcgttgctcgcctcgccgctgaccgccggcctgtacagcgcggctgtgctgcaaagcggcggcccgcgccccggcgcgcggacgaaagccgaggcggaggcacacggccttgagatacagaaaaagctgggctgcgcgtcgatagaggagatgcgcgcaaagccggtggaggacattttggccgcgacaaggccggagccgggcgcgctgcgtctccggcccgttgtggacagctatgtgctgcgcgaggacccgtacagcgcgtttcttacggggcgcatcgggcaggtgcccgttctgatcggctccaatgcggacgaggggctgttcgccccggtgaacggtgaaaccttcgaatcgtttgaggccgacgcgaagcggtatttcggcgcggactacggcgagttctgcgcgctctataattttacgccggagaatttccgcagggcggcgctcgatgtgcagcgcgatttcgcgttcgtcaatatccgccacgtgctgcgcactctgagccgcgtccacccctgcccggtctaccagtattactttacggagccgatcttgctgcaggacggcaccttcgtcggcgcgacgcactcggcggagctgttttatgtgttcggcacgctcgacgtgctcggcagcagtacggtggagggcggcgcgatggacgtcaaaaaggggcggccgcagtatgcgctttcggcgcagatgggccgctattgggtgaattttgtccgccgcggcgacccgaacggccccggcctgccggaatggcgcccggccggcgacggcgagtacatgcacttttccgcaaacgacgtgcagagcgagcgcacccgccgccccgcccgcgtctctttcatcgaaaagcacaggccgggagaataaacaaaaaagagcccgccgcaccgggaagaaccggggcggcgggcctgcgctttcaaaaagcgccgtttatgtttttacttgcattcgcgcgcggcgggagaagcggctcagccttcctctgccggcgcctcgggcttcggcgtgacggtgatgcgcacgcgcgtggtgcgctggtactccgtctcctccacggcgacgtgcaggttttcgaaatcgaagctgtcgcccttttccgggatgcggtcgagctgctcgatcacccagccgttgattgtggaggcctcggtttccgccttgatgccgaagaaggcgaacatctcgtcgaggtcggtcgagcagtccacgaggtacacgttctcgctgagctttcggaacgattcgaccacccggtcgtgctcatcccagatttcgccgaccagctcctcgatgatgtcctcaagcgtcacgataccctcggtgccgccgaattcgtcgacgatgaccgcgaggtgcgacttgtttttctggagcagcttcaaaaggacggagatcttcatcgacggcgggatgaattcgacgggcttgacaatgctctcgagtgccgcgccgccgcgcaccacgtagttgtggaagtccttttcattgatcaggccgatgatattgtcgatcgattcctcatagacgggcaggcgggaaaagcccgtctgaatgaacagctgcgcaatatcctccacatcgctgtctgcggggatcgcctccacatcgacgcggggcgtgaagatgtcgatcgcctccagatcgtcgaactcgatgacgttgtggatcagcgtgctttcattggcgttgatgccgccctcctgctcggcctcctcgacgatcgtgagcagctcgctttccgagatcgtgcggtcgtcggagaccttgatgaagcgggaaaccagctttttgatgccgacgagcaggaaattgatgggcttgaacacataaatgagcacgttgatgatcggcgcggaaaacatcgcgaacgcctcaggcgattccttggcgatgcttttcggcgtgacctcaccgaagatcaggatgatgatcgtcatggctacggtagaggccgtggggccggcgctgccgccgagcatctggatgaacagaaccgtggcgacggacgaggccgtgatgttgacgatgttgttgcctacgagtacggaggagatcagctcgtcgtagtttccggcgaggcggtaggcgagcttcgcgcgccggttgccgctttccgcaaggttcttgatgcggatgcggttcagagaggagaacgccgtctccgtcgcggaaaaatacgccgacaagatgatcataatgatgatggtgacgattaaccctgtactgtgactgtccatttgagaaaaaataacctttctttcctacaaaaaatttgccgcggctgtctgccgcccggcatgtatattttttaatcatagcatataaagggctcggtgtaaacagtaaaatttcgggggcggttttgcaccgtctgcggaaggcttgaaaaaaccgccgcgttcctgtatgatacagataggcttaatatgcgcggcggaaagcgccggcggcgggcggcaggcgcggctttttgaggcatcgagcggcgcgcagtaggggggcaagggcatgaaaagaaaaatcaacatcggcgttctcgcgcacgtggacgcgggcaagacgagcttgacggaacagcttctgttttacggcggtgcgctccgatcggccggggcggtcgacctcggcaccgcgcagaccgatacgctggcggtcgagaggacgcgcggcatctcggtcaaaacggcggacgccgtgctcgagacggagacggccgtcgtcaatctgatcgacacgcccggtcacgccgatttcatcagcgaggtggagcgggcgctttcggtgctcgactgcgcggtgctcgtcatctccgccgtcgaaggcgtgcaggcgcagaccgaggttttgctcggcgccgtgcagcgcttgaagctgccgtgcgtggcgtttgtcaacaagctcgaccgcgtgggcagcgatttcgaggcggcctgcgcggcgctttccgatctgcttgcggaccgcacgctgctcgtcgtgaaccgtcccgagcatgaagggtcgccggaggccgcgccgatgcgggcggcggactgcctcgaaaacgcggtggtgctcgcggaggacgaggcgctgctcgagcgctatctcgcgggcggggctgtggattttccacagacggtgcgcgccgcggtggaaaacggcgcggtgccggtgctctgcggctcctcgaaaacgggcgcgggctgccgcgagctgctcgattttctctgcgcctgcgtgcccgaagcgccgcaggcggacggagaatttctggcccgcgtgttccgcgtggagcacgacaagggcctcggcaagctcgcgcatgtgcgcgttttttcgggcagcatcgagccgcggcagagcgtttacctgccccgctgcggcgcggaggaaaaggtcgcgggcatccgcaggccgctcggccgccggcaggcggacgtgccgaaggccgaggccggcgacattgcggtgctgttcggcctcagcagcgtgcgcgccggcgacgtgctcgggcgcggcgcgctgccgcgggcggaaagcacactggccgtgccgctgctcaccgtgaaggccgagccggaaacccccgcagagatcacggcgcttgccgccgcgctttcggcgctcgccgacgaggatcccgcgctccgcttcgagtgggtgcgggaaaagcgggagatccagcttaggattgtcggcaaaatccagctcgagatcctcggcgcgctgcttttggagcgctacggcctcaaggcgcgattttccgcgccgtccgtcatctataaggaaacgccggcaagggcgggcgagggctatgccgactatctcgcgccgaagccctgctgggcggttctgcgctttcgcatcgagccgctgccgcgcggttccggcctcgtctacgaatcgcaggcgtcgcccgcccggctcctgtaccgctaccagaaccacgtggagaccgcggtgcccgaggcgcttttgcagggactcttcggctgggaggtcaccgacctcaaggtgacgctgctcgacggtgagcaccaccacgtccacacgcacccgctcgactttttcgtctgcacgccgatggcgatcatggacggcctcaaaaactgcggcacgacgcttttggagccggttctccgcgtgcgcgccgtgtttgacccggcgctttccgggcgcgtgatcggccttttgcaaaacgcgcgcggcacgctgctctcgcaggcggtgcgcggggaacgccagcttttcgaggccgaggtgcccgctgcggatagtctggagctgcccgtggagtttgcgaagctgaccggcgggcggggcagcctctccgcggtgttctcgcattacgcgccgtgcccgccgggcttcacggccgagcgcgagcgcatcggcgcgaacccgctggaccgcgcgaaatacattttggaaaagcggaacgcgctcgccacatgagcctgcgcgccctttaacgcaaagcacagtctccgcgccgcgcttcatgcggcccggtttacagatacaaggctgttgtatagaaaggaaacggtttatggaatatacggaaaataagatcgtgcccgagcgcgctctgctcgtctcgctcgataccggcgaatacgacgcggaaagctcgctcgacgagctctgggagcttgcgaagagcggcggggccgagcctgccgcgacgctgacgcagaagcgccccgcgcccgaaacggcgacgtgcgtcggcagcggcatggtgcaggagatccgcgcgttctgcgagaacaacgaaatcgagctgattatcttcgaccgcgagctgacgccgacgcagatccgcaacctagaaaaagagaccggcgtgcgcgtcgtcgaccgcacgatgctgatcctcgacatcttcgcccagcgcgcgcagagccgcgccggcaaggtgcaggtggagatggcgcagctcaagtaccttctgccgcggctttcgggcaagggcgcggcgctctcccgcctcggcggcggcatcggcacgcgcggaccgggcgaaacgaagctcgaaaccgaccgcaggcacatccgccggcgcatcgaatcgctgcgcgagcagctcaagaaggtggagacaggacgaaaggagacgcagcgccgccgtgaaaaggacggtacggtgaccgtggcgctcgtcggctacacgaacgcgggcaaatcgacgctgatgaatctgctcacacaggcgggcgtgctcgccgaggacaagctcttcgcgacgctcgaccccacggcccgcgcgctgaagctgcccggcggcaagactgtcatgctgatcgacacggtcggcctcgtgcgccgcttgccgcaccatctggtcgaggcgttcaagtcgacgctggagcaggccgcgacggcggacatcatcctgaacgtctgcgacgcttcgagtcccgaggcgcgcgtgcacctcgatgtgacgggcgagattctccaaagcctcggctgcggcgaccgtccggtgatcccggtgctgaacaaatgggatctcgtcgaaagcccggacgatgcggtgcacgtgccgggcgcggtgcgcatcagcgcgctgaaaaatgaggggatcgaggcgcttttgcaggccgtggaggacaatctgccggtgaaagccgtggaggtcacggcgctgctgccgtttgcaaagactggcgtcgccgccgcgctgcgccgcgcgggcgcgctgctctcggaggaatacaccgccgaggggcttttgctccgcgcgcgcgtggagccgcgggagctcgcgctgctggagccgtttctgacggaggacggcagtgtataaacgaatgtatacgactgtattttatacattgcatacattaaaaaatgtatagagcatggccgcactcctgcaaaaactggacaatattcagcgtatgaggccgtgaaaggctggaaatacggaaaatctgccgaacatgaataaatattcactttgggggttgatttttccggaaaacggtgtataatgaaaaccgttgaaattcaaaaagcgattttccgccggctccgccgcgcggtgactgtagcaaagaaagaggttttgaaaatggcaaaggaaatcaaaaaggtcgttctcgcctattccggcggcctcgacacatcgatcattatcccgtggctcaaggaaaactacaataactgcgaggttatcgcggtttccggcgacgtgggccagggcacggagctcgacggcctcgaggagaaggcgattaagaccggcgcctcaaagctctacatcgaagacctcaagcaggattatattgaaaactacatttggccctgcctcaaggcggacgccaagtacgaggactacctcctcggcacctcgcacgcgcgcccctgcattgcaaagcgccttgtggagatcgcaaaggccgagggcgcggatgccatctgccacggctgcaccggcaagggcaacgaccaggtccgctttgagctgaccatcaaggcgtttgcgccggatatgaagatcatcgcgccgtggagagagtggtccatcaagtcgagagaggaagagatcgaatacgcggaggcgcacaacatcccgctgaagatcaaccgcgagacgaattattccaaggataagaacatctggcacctctcgcatgagggcctcgatctggaaaacccggcgaacgaaccgcagtacaacaagcccggctttttggagctcggcgtttccccggagcaggcgcccgacgagccgacttatgtgacgatccattttgaaaagggcgttcccaccgcggtggatggcgtggaaatgggtgcggtcgagctggtcgcgaagctgaacgcgctcggcggcgcgaacggcatcggcctgctggatatcgtcgaaaaccggcttgtcggcatgaagagccgcggcgtgtacgagacgccggccggaaccatcctctacaaggcgcacaacgtgctggaaacgattacgctcgacaaggaaaccttccattacatgcaggcgcaaatcgcgccgaagatggcggatctcacctacaacggccagtggttcacgccgctgcgcgaggcgctctccgcgttcgccgacaaggtcaacgagaacgtaaccggcgacgtcaagctgaagctctacaagggcaacgtcatcaacgcgggcgttacctccccgtacaccctctacgacgaggagatcgcgacgttcgacgaggacgaggtttacgaccagaaggatgcgcagggctttatcaacctcttcggccttccgatcaaggtgcaggccaagcagaaagcgaagctcgaagcaaagtaaaaaattcagatacggggtaggcggatctgcctgcccttttctggcttaaaggagggcgcggagaatggagctgatcgacgtttacgaccgaaacggaaaccgaacgggcaaggtcgtcgagcgcggaacaccgctgttggagggcgaatacattttggcggtcggcatgtggatcgtgaacgggaaaaacgagatctttttgacaaagcgcagccccgaaaagtcgtatgcgccgaataaatgggagaatacgggcggccacgtgcaggccggagaggactgccttgcggcggtgatccgcgagctgcgcgaggagacgggcgtcgccgtgtcggcggagcaggtcacgctgctcggcggcacgatgtgcggcggcgaagcgaccgggcactacctcgggcagacgttcggcgtgcgcatggattttgatctgtgcgcggtgcggctgcagtcgggggagacctgcgacgcgcaatgggtcgattacgcggcgttctgccgcatggccgaaagcggcgcgctcgcgccgtcggttaccgcacatctggagaattataaagagagctttttgaaatttatcgggcaggcggcggatgcgctgccggagaaaggatgacatcaatcaaaatgaagctgtggaaagggcgcttccagaaggaggcggatccgaaaacgaacgatttcaattcgtcgatttcggtggacagccggatggtcaaagaggatattgagggcagcatcgcgcacgcgacgatgcttggcgcctgcggcatcatcgcgcagagcgagagcgacaaaatctgcgcggagcttgaaaaaattgctgcggatattgaaagcggcgcgctgcatatcgacccggacgcggaggatattcacaccttcatcgagggcgagctgaccgcccgcatcggcgacgcgggcaagcgcctgcacacggcgcgcagccgcaacgatcaggtcgcgctcgatatccgcctgacgctgcgcagggaatgcgcgggcctcatcggccagctcaaggagctgatttccgtcctctgcgaccaggcggaggaatacgccgacgcggtcatgcccggctacacgcatttgcagcgcgcgcagccgatcaccttcgggcaccacctgatggcgtatgccgagatgttcctgcgggacatcggccgcatgcaggacgccgtgaagcgcatggacgtctgtccgctcggctccggcgcgctcgccggcacaacctatccgctcgaccgtgatctcacggcgaagctgctcggcttcacggcggtcagccgcaacagcttggacggcgtggcggaccgcgatttctgcgcggagatcgccgcggcggtatcgctcgcgatggtacacctttcccgcttttcggaggagatcatcctctggtgctcgtgggaattcaaattcgtcgagctggacgacgcgttttccaccggctcgagcatcatgccgcagaagaaaaacccggacattacggagctgatccgcggcaagagcgggcgcgtgttcggagacctcacggcgctgctcacgatgatgaagggcctgccgctcgcctacaacaaggacatgcaggaggacaaggaggccgtattcgacgcggtcgatacgctccgcctgtgcctcacgccgtttatcccgatgctgaaaacgatgcgtgtcctgaaggaaaacatgcgcagcgccgcggcgaagggcttcatcaacgcgaccgactgcgccgattacctcgtcgccgcaaagggcctgccgttccgcgacgcgtataagattacgggcgagctggtcgccctgtgcatcgagcgcgggctgacgctcgaaacgctgccgcttacggaatacaagaaggtctgcgaatcgttcgacgagggcgtgtatgaggcgatcaacctcgaaaaatgtgtgaatgaccgcagggtcaagggcgggccgtgcccggagaacgtccgcgcggcagcgaaggaagttcgcgccctgctggcttgagaaagaggaggcattgcggatatggagaaaataaaagtcggcgttgtcggtgcgaccggttacgccggtgcggaaatttgccgcctgctttacgcgcaccccatggcggagcttgcggcgatcagctcggtcagcttcgaggggatggcgctttcggacgtatatcccgcgtaccgtgcgctgtgcgatctcgtctgcgaaacgcaggcggacgtcgtggaaaagagcgacgtgattttcgccgcgctgccgcacggcctttcgcaggagcttgcggcggaatgcgatgcgaaaaacaaggcgtttatcgatctcggcgcggacttccgcctcgagagcgaggaggcatacaaggagtggtatggcggcacgtttatggacaaggcgctgcaccaaaaggcggtttacggcctgccggagcttttccgcgagcggatcaaaacgacgaagctcgtcgcgaatccgggctgctatacgacggcggtgccgctggcgctcgtcccggcgcttgaaaaggggtatatcgagcagaccggcatcatcgcgaactgcgcgagcggcgtgaccggcgcgggccgcaagctcgcccagaacagccattatccggagctgaacgaaggcatgtcggcctataaggtcgcgagccaccgccacacgccggaaatcgagcagacactctcgaaaatcgcgggcgccccgatgcgcatcacctttgtgccgcatcttttgccgatcaaccgcggcattctcgcgacgtgctacgcgcgcctcaaggacggcgtgacggaggaaatgctccgcgcggcatatgaggagcggtacgggagcgagccgttcgtccggcttctgccaaagggcaggagcgcggatattcacaacatcaagtacacgaatttctgcgacgtgtccatctttgtggacaagcgcaccggcatgtttatcgcgatcagcgccatcgacaacatggtcaagggcgcggcagggcaggcaatccagaatatgaatatcctgttcggtctcgatgaaacgaccggcctcatgcaggttcccccggcattctagcgggcgtggtgggcacggcccgcggcggagtcgcggagtcgctcggcgagcctcgcttcgccggtgcgggaaataaccgcagtaaacgcgcacggcggcgcagctgcggaaaagtggctttcggggcgcgcgctttttgggcgctctcaggcgcagaaagaaaactgaattttaggagtgcaagcttatgcagtatattgaaggcggtgtcaccgcggcgaagggcttccttgcgggcggcgtgcactgcggcatccggaaaaataagtcgaagcgcgacctcgcgctgatctacagcgagaagccgtgtacggcggcgggcgtctacacgcagaatcttgtcaagggcgcgccgatcctcgtcacgcagcggaatcttgcggacggccgcgcacaggcggtcatctgcaacagcggcaacgcgaacacctgcaatgccgacggcgaggcgaaggcgtggcgcatgtgtgagatcgcggcggaggcgctgcacatcgacccgcacgacgtgatcgtcgcttccaccggcgtgatcggccagattctgccgatcgagccgatcgaaaacgcggcggaagcgctcgcggcgtcgctcagcgaaaacggctcgaacctcgccgcgcaggcgatcatgacgacggacacgatcgaaaaggaagttgcggtgcagtttgagctcggcggcaggaccgtcacggtcggcggcatttcaaagggttccggcatgattcacccgaatatggcgacgatgctctgctttgtgacgacggactgcgcgatttccgccgaaatgctccaaaaggcggtcaaaaaggccgcggacacgacgttcaatatgatcagcgtggacggcgatacctccacgaacgacacgctcgcggtgatggcgaacggcgaggccggcagcgcggagatcacggctgaggacgaagcgttcgacgcgttctgcgcggcgctgaccgcggtgtgccgcaggctctccatgatgatggcgggcgacggcgagggcgcgacgaagctgctgatttgcagaaccaccggcgccgccgattgggaaacggcaaaaaccgttgcgaagtcggtcatctgctcggcgctcttcaaggctgcgatgttcggcgaggacgcaaactggggccgcgtgctctgcgcgatcggctattccggcgccgacatcgacatccacaaggtggacgtcgcgttccagagcgaaaacggccgcgtggacgtctgcaaaaacggcgcgggcgtcgatttcagcgaggaggaggccgcaaaggtgctccacgcaaaggagatcacgacgcttgtgaacctgaaaagcggcgaagcggaggccgaagccttcggctgcgacctcacctacgactacgtgaaaatcaacggagattaccgcacatgagtacagaaaagaaaatcggaatttcaaacggcgaccgcgcgcacgtgctcgtgcaggcgatgccgtatatcaagaagtgggccggggagacgatcgtcgtcaagtacggcggcaacgccatgatcaaccccgagctcaaggaagccgtgatgaacgacatcgtgctgatgcagcttgtcggcatcaacgtcgtgctcgtgcacggcggcggcccggagatcagcgcgatgctgaaaaagatcggcaaggagagccggttcgtcaacggcatgcgctacaccgacggcgagacgatggacatcgtgcagcaggtgctggcgggcaaggtcaacaaggacctcgtgcagcttctcgaaaacacgggcggcaaggcggtcggcttgtgcgggcaggacggctcgctcttaaaggccgacaagctgcccgcggcggaggacctcggctttgtcggcgagatccgcgaggtgaacgcgcggatcatccgcgattcccttgcggcggggtatactccggtcgtttcgaccgttgcggcagggtatcacggcgaggtgtttaacatcaacgccgacgttgcggcggcgcgcatcgcggccgagctcggcgcgcgcaagctgattttgatgaccgacatcgtcggcctcctgcgcgacaaggacgacgaaagcacgctgatcccggtcgtgaacgtcagcgacgtgccgaagctcaagcgcgagggcatcatcagcggcggcatgatcccgaagatcgactgctgcgtcgaggcggtgcgccgcggcgtggagcgcgcgcatatcatcgacggccgcacgccgcactcgattctcgtcgagctgtttaccgacgagggcatcggcaccatgttttattgatttccggcggcgcaccgcaaaaatgcggggccgccgcgagaaatggagaaaggggcgaacagccatgaacttgaatgagattcaggcgctggacgacgaatgcgtgctgcacacctacggccgcctgccggtggcgctcgaccacggcaagggctgcgaggcgtgggacacggaggggaagcactactacgacttcacctcgggcatcggcgtcaacgcgttcggctactgcgacgacggctgggtgaaagccgttaccgagcaggccgggcgcatccagcacatgtcgaactactattactgtgaaaaaaacgcgctgctggccgcggcgctccaaaaggcctccggcatgggccgcgcgttcttctgcaacagcggcgcggaggcgaacgagtgcgcggtcaaggttgcgcgccgcttcggggagaaaaagggcgcgcataagattgtcacgctgaaaaactcgttccacgggcgcacgatcacgacgctcgcggcgaacgggcaggacgcgtttcacgaatatttcctgccgctgaccgagggcttcgtctatgccgaggcgaacgacatcgccgacctcgagcagaagctcgacggcacggtctgcgcggttttgctcgagagcgtgcagggtgagggcggcgtgattccgctcgacacggactacctgcgcgccgtgcgcaggctgtgcgacgagcgcggcgcgctgctgatgctcgacgaggtgcagaccggcgtgggccgcacgggctatttcttcagctatcagggctgtggtgtgcagccggacgtcgtcacggcggcaaagggactcggcggcggcctgccgattgcggcctgcctcgtctctaaggcgctcggggatattttcacgccgggcatgaacggctcgaccttcggctcgaacccggtggcgagtgccggcgcgctcgagatggtcacgcgcatcgacgacgcggcgttcctcgccgccgtgcgcgagaagggagaatacttccgcgcggcgctctcgaagctggagggcgtcgagtacgttcgcgggcgcgggctaatgcttggcatcaagctgaaaaaccgcgatgcgcacgacgtgatggaggcctgcgcaagggccgggctcctgattctgacggcgaaatcgctcgtgcgttttctgccgccgctcacgatcacgaaggaagaaatcgacgcgggcctgcgcatcttcgcagagcagatcaagggctgatggatacccgcgcagcgtaaaaacaaaaggaaaggaaccggcatatgaaacacttattaaagctcctcgacctcacgggggaggagatcctcgagatcctcaacctcgccgaccagctcaagtacgagacgaagcacggcatcgagcacccgcacctgaagggcaaggcgctcggcatgatctttgagaaatcctccaccagaacgcgcgtttcgttcgaggtgggcatcaaccagctcggcggctacgccgtcgtactcgcgggcgagggctcgcagatcggccgcggcgagccggtgcaggacaccgcgcgcgtgctctcccgctatgtggacggcatcatgatccgcaccttcgaccagaaggaggtcgaggatctcgcgcagtacggctcggtgcccgtcatcaacggcctcacggatttctgccacccctgccagattctcgccgacctgatgacgatccgcgagtataagggctcgtttgacggcctcaagatgtgcttcatcggcgacggcaacaacatgatgaattcgctgatcgtcggctgcctcaaggtcggcatggcggtttccgtcgcgtgcccggagggctaccgcccgccgcaggaaatcctcgatttcgccggcgcatacgattgcttcgagctgacggaggacccgctgaccgccgcgaagggcgccgacgtcgttatcaccgacgtgtggacctcgatgggtcaggaggaggagcgtgcggcgcgcgaaaaggcgtttgcaggctactgcgtcgacggccgcatcatggccgccgcgaagccggacgcgattgtgcagcactgcctgccggcacaccgcggcgaggagatcaccgcggaagtgtttgaggcgaacgccgcgccgatcttcgacgaggcggagaaccgcctgcacgcgcagaaggccgtcatggtcatgctgatgaaggaccggtaaagcatgccgatcttgccgtatgacgctgttttcggcggcgcacggcagagaaaatgctggacaaacagcgaagagaacgcccgggctgcggttttccgcggcccggcttttcgtttgtggaatttccgcgcaaaagcccggtttccgcttgatttttccgctttgccgcgctacaatgagggcaaaactcagatttttaaggggagtgttgtttatgttgagaaagcagccttggtttgatttctgcgacgcactggagatcgagatcgagcagagcgtggaggagggccgcgacgccacgcattatgcggcgcaggccagacaggtgcaggcgatggaccgcggcgtcgagcggacggccgcgggcgcggcgctgctcgagcagatcgagtctctgcccgcgtcgcgtaccgcgcaggagccttctgatctcgcgggcatccgcgcgcttgcggcgggagagccgtccgaaaaggccgcggcagatttcaataagatctacggcgcgtggctcggccgctgcgcgggctgcctgctgggccagccggtcgaaggctggcggcgcgcgcggatcagcggccttttggaggagactgggaacctgccgctcagggggtacatctcgtccgacatcccggccgccgtgcgcgaaaggtacggcgtgcgcgacgaccagcatgcctacggcgcggagaaaacgggatggatcaacaacgtatcctacatgcccgaggacgacgacacgaattacacgctgcttgcgctcaagctcatcgagcagtatgggcgtgatttcacgccggacgacgcggccgagagctggctgatgaacctgccgctcctgcacacctgcacggcggagcgcgtggcgtacatcaacctcgcacagtccgtctacccgccgcagtcggccatacaccgtaacccgtaccgcgagtggatcggcgcgcagatccgcggcgatctgttcggctacatctgccccggcgatatggaaacggcggcggaaatggcgtggcgcgacgcctcgatctcccacgtgaaaaacggaatctacggcgagatgtgggtctcggcaatgctcgcaaaggccgccgtatgcggcgatatgcgcgcggtggtggaatccggcatgcggcagatcccggccgaaagccggctttatgcggcgctttccgacatgctacgccggttcgacgcgggcgaaacggccgaggccgccgcacagcacatcctcgcgctgtacgatgaggcgaacccgcaccactggtgccacacgatctcgaacgcgatgatcgtcgcgctcggccttttgtggggcgagaaggatttcacgcgcacgatggggctctgcctcacgatgggctttgataccgactgcaactgtgcgacggcgggctccgtgctcggcatggtgctcggcgcggccgcgctgccggaaggctggaccgccccgctttcggacacggtgctttccggcgtggacggcttcggcctcgtgcgcatctcggacatggcgcggcgcacggcggcgctcgtctgaggcccgaaaacgcgcgggaaaagacaggcgcgccggcccggctgcttccaacccggacgaaaactttgacgtgctctgcgccctgtgggagagcgagcaaaagtttcgcgttttgaacggcccgctcgccggcgatttcgaccatccgggcgcgtgagatccgcctgcgccccgcggtgtgggcgagggaccgcgcgcggtgtgcggcggaaaatattgcagcagaatttgcgggcgtgccggaaaagcggcgcgcccgttcacaatttttttggaatttgcggctgttcaagcccctcgaaatatggtatactaaaacaaatatgggcttttccgcccttttttagaaagggaaaacagcatgattgttctcggcatcgaccccggttatgcaatcgtcggctacggcatcattgaaatgaagggcaaccgctaccgcacgctggagcacggtgcggtgacgaccaaggcgggcgtcgatttcaaccggcggctcgagattatttttgacggcatgacggaaatcttcgcaaggtatcgcccagacgccgtctcggtggagaagctgtatttttcaaacaacaagacgaccggcatcggtgtggccgaggcgcgcggcgtgattctgctcgcggcgcagaaggcgggcgtgcccgttttcgagtatacgcccgtgcaggtgaagctcgccgtcaccggctacggcaaggccttaaaaccgcaggtgatggagatgacgcgccgcctgctctgcctcaaggcggtgccgaagcccgacgacacggcggacgccctcgcggtcgccatctgccactgccaggcctcgggcacggcgctgcggcagtttctgcggtgaaatacggaaagaggctgcaagaatgcggccctctagcatagagatagagaaggggatttgaaattatgttttacagcctgaccggcaagctcgtgcacatggaaccgagcgtcgcggtgatcgagtgcggcggcgtcgcgttcaagtgcctcacctcgatgcacacgcagcgcagcctgccgcgcatcggcgagacggcgacgttgtacacgcacttaaacgtccgcgaggatgcgctcgacctgttcggcttcagctcgaaaaacgagctgaactgctttaaaatgctgaccggaatcagcggcgtcggcccgaaagtcgcgcttgcgatcctttcggagctctcccccgagggtgtggcggtggccgcggcctcgggcgacagcaagagcttcacgcgcgcgagcggcgtcggcccgaagctcggccagcgcatcgtgctggagctcaaggacaaggtgaagaagatggcgggcacaagcggcgatctgcagctcacgcccgcggaggccggcgtgatttcggcctcgaagaacgcggagcaggccgtgcaggcgctgatcgtgctcggctacacgcagtccgaggcgtcgcaggccgtggcaaggctcgattcggcgctcgcgaccgaggagctgatccgcctcgccttaaagggcatgagcgcccgtttttcgtaaagaaggtgctaaaaagccatgacatttgacagagacgacgattttgattttgaaaaccgcgtgattgcgcccgaatatgcgccggaggatgcggaggtcgaaaacccgctgcgcccgcgcacgttcggcgattacgtcggtcaggagaaggtcaaggaaaacctcgaggtgttcatcgccgcggcgaagcagcgcaaggaatcgctcgaccacgttctgctttacggcccgccgggcctcggcaaaacgacgctcgcgggcatcatcgcgaacgagctcggtgtgaacctgcgcatcacgagcggcccggccattgaaaagcccggagacctcgcggcgctcctgacgaacctcagccccggcgacgtgctgtttatcgacgagattcaccgcctgccgcgcgccgtggaggagattctctacccggcgatggaggatttcgcgctcgatatcatcaccggcaaggggcagatggcggcctcctaccacctgccgctgccgcgtttcacgcttgtcggcgccacaacgcgcgccggccagctcacggccccgctgcgcgaccgcttcggcgtcgtgctgcgcctcgagctgtatgagccgaaggaactctcgaagatcgtgacgcgcagcgccggcatcctcggcatcgagatcgaggcggacggcgcgctcgagatcgcctcgcgctcccgcggcacgccgcgcatcgcgaaccgcatgctcaagcgcgtgcgcgatttcgcgcaggtcatgagcgacggcgtgatcacctacagcacggcgaagatcgccctcgaccgcctcgagatcgacgagctcggcctcgattccggcgaccgccgcatgctcaacgcggtcatccagttctacaacggcggcccggtcggcgtggagacgctcgcggcggctatcggcgaggaggccgtgacgatcgaggacgttgtggagccgtatctgatgcagatcggctttttgcagcgcaccccgcgcggccgctgtgcgacgcgcgccgcttacctgcaccttggcctcaccccgccgggcgccgccgcggacgacaacccgcggctcgatgtttaaatttgcttttccctgtgccggtgcggccggcagccagctaacataaaaaatacagcgtaaggagaacaagattatgggtagattattcggtacggacggtgttcgcggcgtcgcgaacaaggacctcacctgcgagctcgcgatgaagctcggccgcgcggctgcggccgttttgacgaacaagtcgacgcgccacccgcgcgtcatcatcggcaaggacacccgcctttcgagcgacatgctcgagaatgcgatggcggccggcctgtgcagcgtcggcgcttcggttgtgctgctcggcgtcgtgcccacgccggcggtcgcctaccttgtcgagaagtacaaggcggatgcgggcgtgatgatctccgcctcccacaactcctacgaatacaacggcattaaaattttcagcggcgacggctacaagctgccggacgaccttgaggagcgcatcgaatcgctgatcctcggcgaggccgcgctgccggccgcgcccgcggacagcgacctcggcacggtggagacggcgccgaacgcgctgcgcgactacatcgaccacgtgaaatcgaccgtgcatttctcgctcgacggcctcgaggtcgcgctcgactgcgcgaacggctcctccgcgatgacggcggaaacgctgtttacggagctcggcgcgaaggtgcacatgctctcgaacgagccgaacggcgtcaacatcaacgacggctgcggctccacgcacatggagagcctgatcgagtacgtcaagacgcacaaggttgacgcgggcatcgcgttcgacggcgacgcggaccgctgcctcgcggtcgacgaaaacggcgagccggtcgacggcgacttcatcatggcaatctgcggcctcgacatgaagagccgcggcaagctcaacaagagctgcatcgtcggcacgattatgacgaacctcggcttcgtgaaattctgcgagcgcaacgacattcattttgaggcgacgaaggtcggcgaccgctacgtgctcgaggagatgctgctcgaaaactacagcttcggcggcgagcagagcggccacgtgatcttccgcgattttgcgacgaccggcgacggccagcttacggcggcgcagctgctcagcatcatgaagcgccgcgaggcgaagctctcctcgatgacgacggtcatggagcgctacccgcagacgatcaagaacatccgcgtcacgcccgagggcaagctcgcgttctacaccgacccgaaggtcaagaaggcgatcgacacggccacaaagacgctcgccggcaacgggcgcgtcatcgtgcggccgtccggcacggagccgctgctgcgcgtcatggtggagggtcaggatctcgagctgatcgaaaagctcgcaaacgatatttcaaaggtcatcgaggaagagcttgtttcatgaggattgcagactggaaggattatgaactgatcgatacgggctccggcgagcggctcgagcggtggggagatattctcctcatccgccccgacccgcagatcatctggaggtccgagaaaaaagatccccgctggaaaagcgcgcacgcgcgctaccgccgctcaaacacgggcggcggccggtgggaggtctataaaaagctgcccgacgtgtggaagatcacgcgcgggccgctcacgttccgcctaaagccgatgggcttcaagcatacgggcgttttccccgagcagggcgtgaactgggactacacggcgcggtgcatccgcgaggcgaagaaaaaggaccccgcgcgggagatccgtgtgctgaacctgttcggctacacgggcgcggcgacgctcgcctgcatggaggccggcgcggccgtgacgcacgtggacgcttcgaagggcatggtgcagtgggcgcgtgagaacgccgcggcctccggccttgcggagcgcccggtgcgctggctcgtggacgactgcgtgaaattcgtccagcgggagatccgccgcggcaaccactacgacgggatcatcatggaccctccctcctacgggcgcggcccgggcggcgaggtgtggaagctcgaggagcagctctacggtctcgtggagatgtgcgtgccggtgctcaccgagaacccgctcttcttcatcttaaattcctacacgacggggctttcgccctccgtgatggcgtatctgctcggcgtgcttttaaagccgcggttcggcggcgccgtctccgccgatgagatcggcctgccggtcacggcgacggggcttgcgctgccctgcggcagcacggcgatctggtgcgcgggggactgagcgcggccgggaaaggcttggtgatataagtgagttttatagaatgcagggcgctgcgcttcgcctacggcgaggagaccggcgaggtgctgcacggcgtcgatctcgatatcaaaaagggcgagttcgtcgcgctgctcggccacaacggctgcggcaaatcgacgatggcgaagctcttcaacggcatgcttgtgccgacggccggcacggtttttgtggacggcatcgacaccgccgtggaggatacgcagctcgatgtgcgccgccgcgtcggcctcgtgcagcagaatccggataaccagctcgtcgcgggcatcgtggaggaggacgtggcgttcggccccgaaaacctcggcatcccgcccgcagagatccgccgccgcgtcgatgcggcgctcaaggccgtcaacatgtacgagtaccgcgagcacgcgccgcacaagctctcgggcggccagaagcagcgcatcgcgatcgcgggcgtcatcgcgatggagaccgagtgcatcgtgctcgacgagccgaccgccatgctggacccgcgcggccggcaggaggtcatggacacgatcacgtatttgaaccgtgaaaagggcatcacgatcgtgctgatcacgcattatatggacgaggccgtgcgggccgaccgcgtcgtcgtgatggacgacgggcaggtgctgctggacggcggcccgcgcacggtattcgcgcaggtggagcttttgaagcgccaccaccttgacgtgccgcaggcgacggagctcgtctaccggctgaacgccgcgggctgccgcattgccggcgcgccgctcaatgaggacgaatgcgtcgcggcgatcggcgcgtatctgaaagaaaagggctcgccgtctgccggctgagccctctcccgcccgcaggggcggctgtttatcccgtaaggtttaccggggcaggatcacgcgacctacacccggcagcggaggaattcacatggcaattttagaaacgaaaaatctgacctacacctacggcgcgggcacgccctttgaaaagaccgcggtgcaaaacgtctcgatcgcagtcgaaaagggcgagtttatcggcgtgatcggccacacgggcagcggcaaatcgacgctgatccagatgctcaacggcctgatccgcccgacgagcgggcaagtgctgctgaacgggcaggacatctgggagaagccgaaggagatccgccgcgtgcgctttcaggtgggcatggtgttccagtaccccgaataccagctctttgaggagacagttctgaaggacatcatgttcggcccgaagaacatggggctttccgacgaggaggcgatggagcgcgcgaaggaggcggcgcggtttacagacctgaagccgtccctgctcgaaaaatcgccgtttgagctttcgggcggcgagaagcgccgcgcggcgatcgcgggcgtgatcgcgatggaccccgaggtgctgatcctcgacgagcccgccgccggcctcgacccgaaggggcgcgacgtgatcctcgcgcagatcgcgcagtaccacgcgcaccggcacaacaccgtgctgctcatttcgcacagcatggaggacatcggccgcacggccgagcgcgtgctcgtcatgaataagggccgcgccgaaatgctggacaagacccgcgccgtctttgcacgcggcggccttttggagccgatgggcctgcgcctgccgcagatcaccgcgatcatgcggcggctgcgcgcgatgggtctgccggtaagcgaaacggtcctgagcgtcgacgaggcgctgatggagctgatcccgctgcttgccgggaaaaaggacggggaggtgcagccgaaatgatttccgatatcacaatggggcagtttttccccggaaaatccgttctgcaccgcatggacccgcgcatcaagctgtgcctgaccgtgtacttcatcgtgctgatcttctgcgcgcagaactttgtcacgatggcggcgacgatttttatgtgcttcctcggcatcgcgctttcgaaggtgccggtgaagctgtacatcaaaagcttgaagccgattctgttcatcgtcgtgtttaccggcgtgctcaacctcttttacgggacgggcgagccgctcgtgaagctcggcttcatcacgatcacgatgaacggcattttgaacagcatcatgatcgcggtgcgcatcgtcgtgctgatcctcatcagctcgatcctcacgtttacaacctcgccgacgcagcttaccgacgcgatcgagcggcttttgaagccgcttgcgctgctgcacgtgccggtgcatgaatttgcgatgatgatgacgatcgcgctgcgttttgtgccgcttctgctcgaggagaccgagaagatcatggcggcgcagaaatcgcgcggcgcggatatggagagcggcggccttatccagcgcatcaaggcgctgatcccggtgctgatcccgctctttgtctcggcgttccgccgggcatttgatcttgcgaccgcgatggaaagccgctgctacaacggcggcgcgggccgcacgaagatgaaggttttaaggctcgggcgcgtcgatttcgtgtcgctcgccgtgtgtgttctgttcctcgcggtgttcgccgcgctgaatatcgtgctcccgccggcgatcgtgcggtgaggctcggccgcgtgccggaaaggaggcgcctgtggagcgcaatctgcttctgacaattcaatacgacggcagcggctaccacggctggcaggtgcaggaaaacgcgcgcagcgtgcagggcgtttttcaggaggcgctgagaagcgtgctcggcacgcagccggacatcaaatcgtgcagccgcacggataccggcgtgcacgcgcgggagttctgcatcagcatgaagctcgaccacggcatccccgcggaaaggctccccggcgcgctgaaccatttcctgccgccggacatcgcggtgctcggctgccggccggtgccgcccgatttccacgcgcggtactcgtgccgcgggaagcggtacgtctatgagatttggaaccacccggtgcgcagcccgtttctgcacggccgcgcgctgcactactaccacccgatcgatgaaaagctgctcgacgcggcggcgcggcacttcatcggccgccacgatttcacctcgttctgcacgctcgataagcgcgaaatgggcgattttcaccgcactgtggccgagagccgcgttacgcgcgagggcgacatggtgcgctttacggtggcggcggacggctttctctacaacatggtgcgcatcatggcgggcacgctgctcggcgtgcagcaggggcgttttgcgccggcggatatgccggagctcctgctgtgccgcgaccgcagccgcgcgggggcgaccgcgccggcctgcggcctgtacctgcaaaaggttttctacgatctgccggcgcaaacggcagaggacgagaggtaacggagtatggcgaaaaacggaaaaattttcaagctgccggtcggcaagcacgccgcggcgccggaaaagcagccggagggcgagattcacgacgagccggacgcggcggagcaccccgcgcttcaggcggtcccgccgccgcgcatctcgaaaaaggtctataaaatcgcggcgattctgctcgcggcgattctgctgctgctcgttcttgaaaactgggagaacctgaccccgggcaatatcggcaactggatccgcacgaaggcggtcggccttggcttcggcgacggctacccggcggagcttgccggcagcacggcggaggcgggcaacttcggcgcgagcggcggcaatgtgtacgtcgtcagcgatacggcgctcaccgtgatgaacggctcggcgaaaacgcttttcacggcgcgccacagctacaacaatccggcggtttccgttgcgagcgaccgctacctactctacaacatgggcggcgcgggctatcaggtggagaccgcttcgggcacgcagctttccggcacgagcgaaagcggggatatcacgaccggcgcgatcgcctcctccgggaaattcgcgctcgcgatacagccggtggatatggcctcgcagcttcgcgtgtacaacaaggacggcagcctgcaatacgaatacgatttcgcggatacctacgtgaatgcggtcgcgctgaacagcgacggcacgcgcggtgctgtggcctcggtcacaagccggagcggccgcctcgtgacgcgcatcacagtgctcgacttctcgaaaacggagccggtcgcggaatacgagagcgaaaacaacctcgtgctcgggctgctctggacgagagacaaccgcgtgctcgccgtgggcgatcaggcggcgctcgtcagcaacggcagctttgaatttgaggcctacgattacggcgggcgcgaggtcacggccctctgcctgaccgattcgcgcgcggtcgtttcggtttcaaactacgcctacggcggcgacagcacgctgctgatcttcggcagcagcgtgcagccggtggaggcggcgctgcccggccgcgccgtgcagctttccagcgctggctcgaaggtggcggcgctgctctccgatcaggtcgtggcggccgatctcgtgaccggcgaggtggaatcctactgcgagagcacggcggacacaaagggccttgcgatggccgacgaaggcagcgtttacatgctgggcgtgcgggaaattcggaaagaaaatcttaaggtaattccggctgaggaggagttgtcctccgcgccctgatgtgctatactagccttgttgaaaaggagatgaacgaagccatgcactttttgttggacgcgggggcggtcgccgtgctgctcctgctcgcggtgatcggcgcaaagaagggctttatcaaggcctgcgcggatttctgcggctcgctgctcgcgatgatcggcgcgggcattctgagcggccccgcggcggaatggatctacggcgcctttttccgcacggcgctcgaggataagatcaccggggccgtggccggcctcagcgcggcggacgccgtggatacggtgttcaaggatttccccgaggtgattcagcgcgcgctcagcgcggcgggcatcacggagggcagcgtgatggcgcagctgcaaagcggcgccgcgggcgttgcgcgcggcatcaccgatgcgctcagtccgatgctgatcggcctgatccgcgtactcgcgatgctcgtcctctttattctgctcacggtcgtgatccgcgcggtcgcgacgcttctgaccggccttttcgagctgccggtgctgcacggcctcaacagcctgctcggcgcgctgttcggcattctgctggcggtcctgttcgtctggatcgcgctggcctgcgtgcgggtgttcctgccgatgctcggcaccgacgtacaggcggcggtcaacgggcttctcgacgagtctgtgctcgccggggcgctgtacaaatttaatccggcgtatttactaatcgggtaaagccgggaatggaaagtggagattatgaaaatacaggaaagggaaatgaccatgtcttttgaaaaatcgggtgaggagaagctgcgcaataaaaacctgaccgtgccgaacgcgatgtcgctgttccgcattctggtcatcccgttttttgcgtacttttttctgaaggataacctgacggccgcggtcatcgcgctggcgctttccggcctttcggatgcgctggacggctttgtggcgcggcgcttcaaccagatcacggagctcggcaagatgctcgacccgctcgccgacaagctgacgcagggcacggtggcggtgtgcatcgcggtccgttacccgacgatctgcccgcttttgtttctgctcgtcacaaaggagctcgtgatgctctgcggcgcatgcttccttctgcaccgcggcaaaaagccgtgcgctgcgaagtggtacggcaaggtatccaccacgctgttttacgcggcgatcgtgctgatcgtcgtgatggacggcttcatgcaggtgcagcccgaggttttcaacctcgtttccaatattgcgctggtcgtgaccgcggcgttcatgctgtacacgtttgtgcggtatttcggcgttttccgcgaaatcctccgcaatgcggacggccaatacgatttgaatcttcccgaagagattcgggcaaaaaagcagaagccgtaaggctttttgcgcttttcagaaaggaatttttagaatatgatgatgtgtacacgatgcaagaaaagacccgcagtcgtttttgtatcgccttccaccgatatgagcgccacacagggctactgccttgtatgcgcgaaggaactcggcatcaaaccggtcaacgatattatggagaaaatgggcatcacggaggagcagcttgaggcgatgaccgagagcatgtcaagcctgatgaacaccgaggacggcggctttgagccgggcggcgcggtgccgtttcccgcggagctgctcggccagctcggcatgaacgccggcggcgacggcacgatgcaggagcggcccgcgccggagagtcagaatgaaaaccggggcgcgaagaaggagaacttccacaaatcgaagcgcaagcacattgcggcgtactgcacggatctgacgatgaaggcgcgccgcggcgagctcgacagcatcatcgggcgcgaacgcgagatcgagcgcgtggtgcagatcctttcgcgccgcacgaagaacaacccgtgcctgatcggcgagccgggcgtcggcaagacggcggttgccgagggccttgcgctgcgcatcgcggccggcgaggtgccggcgaagctgcgcaaaaaagaggttcagcttctggatctgacggcgcttgtcgcgggcacgcagttccgcggccagtttgaaagccgcatcaagggccttgtcgacgaggtgaagcaggacggcaacatcatcctgttcatcgacgaggtgcacaaccttgtcggcaccggcgacgcggagggcagcatgaacgccgcgaatatcctgaagccggcgctttcccgcggcgaaattcaggtgatcggcgcgacgacgttctccgaataccgcaagtacatcgaaaaggacgcggcgctcgagcgccgtttccagcccgtcacggtgacggagccctctatcgaggacgccgccgcaatcatccgcggcatcaagggctattacgagaaataccacaatgtccgcgtgtcggacgcgaccgcgaagcgcatcgtcgtgctttcggagcgctacatcagcgaccgctacctgccggacaaggcgattgacctgctcgacgaggcctgcgcctgcgccgcgctgcgcaacaaaaagctcgccgaattcgaggagacgacgctcgacctcgagaaggagcagtcgaagctcacggagatcgagagcgcgcagagcgtcgactacgaggcgcttgcggaggccaagtacaaggtcgcctcgctcacggaaaagctcgacgcgtttgagccggaggaggtcacggccgcggtgggcgaggcggatctcgcctacgtgatcgagctgtggaccggcatcccggccgcgaagatcgagcagagcgaattgggcaagctcgcgcacatcgaggagaagctccgcgagaagatcatcgggcaggatgaggctgtgcaggccgtttcggccgcgatccgccgcagccgtgtgcagatcaacccgcgccgccgcccggcttccttcatcttcgtcggccccacgggcaccggcaaaaccgagctcgtgcgcgtgctctcgaaggagctgttcgattcgcccgaaacgctgatccgcctcgacatgtccgagttcatggagaagcattcggtttcgaagatcatcggctcgcccccgggctatgtcggctacgacgaggccggccagctcaccgagaaggtgcgccgccgcccgtactccgttttgctgttcgacgaaatcgagaaggcgcatccggatgtgatgaacattctgctgcaaatcctcgacgagggccgcatcaccgacgcgcacgggcgcacggtcaattttgaaaataccgtcatcgtgatgacgtcgaacgcgggcagcaacagccgcgaggcgctggtcggcttcaaccgcaccgcgtcggatatcagccgcgaaaaggccatgcgcgcgctttccgaattcctgcggcccgagttcctgagccgtgtcgacgaggttatcgtattccgcccgctcgacgaggcggattacagaaagatcgccgtcctgatgctgaacgagtacgtcgcaacgctcgcagagcgcggcatctcgctcaagtggagcgatgcggctgtcgaatggatcgcgcacaaggccgcgggcggcaagagcggcgcgcgcgacatccgcagcacgatccgccgcacggtggaggataagatcgccgcgctgctcgtcgaaaagggcgagggcggcgtctccggcatcgccgtcgtcgaaaaggacggcgcgatcgacgtcgaatcgatctgaccgccgtcctgcggttataaagcggcggagcgttcggtcgcaaagtgccatgtgcggccgcctgctgcgggcgctgaaaatacggataaaaacagagcaaacgcgctgcggacacgaaaccgcagcgcgtttttttagttataggccttttattcgaggtgtttcaggcagagcgcggggcggtgagtttctttggcgcgtctcggtcaagcgcgaaagccgcttgatgcgggaaaacacctgccacggacaaagctgaattcagtcccgctcaaggatgaccgcctgctcgtacagcgcgctgtaggcggtttcaacggcatacctgtcgtagatgacgttttcgcctgccgtcgggtcgttgaagatgtacgacgtgtcgtcgtagccgatcaggacgaggcagtgcatcgggccgatccatgtgatctcccgccccgattcgggcacggtccacgtgatgccggtgcggggcgtttccatgtcgatcgtggcccaaatcagcaccgggcttccgttatcgatgtaatttgcgcagatcgtttcaagcgaaatgccggaaagccgctcggcccggtactcggtgccggcgagataatcgttgagcgcgcgttcgatcacggtcgagtagcagccccagccgtcctccgagcgcgggtcgccggggaaggcctcccacgggtcgcagccgatccactgatcgggcgattcctcgttcggctccgcgccgagcggcagaaagttgtcgatgaagtcgccgggcgcgatgttaaagccgtaatagccgagcagcatcgcggcgctgacgctctcgcagccggtcgggaattcgccgagctgtgagtaaaacggtacgccgcgaaccagtacggcgccgtccggaacaatgccggcgaggttcgtattttcggcagacggcgcgggggaggctgtgcgcctgcctgcgagcagcatcagcgcaatcagccccgcggcgacgatcagcaccgcgatgcaggtggagagcatccggcggcgcctgcgccgctgagccgcgcgcagccggcgcgggagcggctcaaattcaagggtgggctgttcataatgttcataggggatatgtgcgttcacggcgggttcctccttcccgttggttggctcacgcttcatagcgcgtgtagaaaatgacggcgctgtccgtttcgtacagctcgcctcgggtgatgctgcggccccaagcgatgcggcaggtctcaaaatcggcgttgacctcggtgacggtgactgtctccgcatcggcgtcaaccgccgtcacgagcatggagtgcatggcgttgggaaaatggatcgtatcgcccgcccgcagctttgcgaaatcgctgtgcgcggtgacgggcgcgtccgtgccgaagagcaggtcgctcaaaagcgaggcgtagccgaagcactggatgccggaaaactccggaaattcggcgagcagcgcgcccttgtaggtgttgcaggtgtccgtgccgtcggcgctgtgggcgcagggcgtgtccgtgatactgagcgccgggtccatccagctcgtttcatcggtgtggttccagaagcgcccgtcctcgaagatgctctcaagaacggcgagcttttcggaaatgccgggcgccgccgtgtcgccgcgcgccgcaatgccgctggttccggccccggcggcaggggaagattcggcgggcgccgtagcccggccgataccgaagcctgcgagcaggccgacgcacagcgcggccaaggcgagcgcggcgtatacggcccgccgggaggcccgcacccggcgaagctcctgccggagcgcgctttttcttttttgactggtgcggctcggcatgaaaacgcctcctctttcgttcagtgtgcggtgaaaagaatccgcagaatatacaggatgatgaaatgcgcgggataaaacaggtagtagccccactggagcgcccggcttctgcggccgagcgcgccgctgtacagctggagaacggggatcgcgagcaggacgaacgggcgaagccacagcgaggtgagcgagccgtgcagaaagtattgcaggaaaaacagaagggatacggccgaaaaggcaatccaccgcctgcgcggcctgtttcggaaaagcccgaaggtgaggatccagagcacggcgatgtagttccagttcgccgaaaaggcgagcagcgcacaggccgcggtgcccaaaagacggaggctcaggtgctgcgtccgctgccaaagcgcgagcgtgagcaggccgagaaaaaggctccacatgatgctggtggccgtccacacgcgcagggggtgaaagttaaagcacagggtgtacggcacgtgggagagcagcgccgcgagcagcaggcggcccagataccgcctgaaatttgaagtgtgctgaaagccctcggcgatgaaaaagcacatgatcggcgcggcgagctggccggcggcgtgcagtgtaaagctcagggggccgtgcggcggcagaaaaagggtcgtgcagtggtccgcggccatggccagaacggcgatgagcttgagcgtgttggcgctcagcgcagggcgcggcaggtgcaaagcgctgttcataggcgggagaagcctccaatcggaaaggcagagggtatgtactgcctatactataaggcaggagctgcaaaaaagtcccccgaaacttgcaaaagaaatgcaaaaatttcgggggaactgcctatatcccgctgcggggacggattttgcggagccgcctagggcgtttcaatcggccggggcgtcgcctctgcggtgtagccgaagcgggcggcgtctatgccgaagcccgtgacctgattttgatccgcgtcgtaataaagggtgcaggggaaattactggaatccgtcagcacgaggacggtctcgctgtcgtaggtcagcgtatagcagtcctgcatggagatgaggatgctctcccataggccgaggctgtaccacatgtttccggaatcctcggaattgttttcggaatcctcggaatctgcggtgggcggcacatcgaactgcagggcgacggcgttgaagaattggatgaaggcgagcgtgaccgcgtcctcgtgcgcataggcgtctgtataggtatcctgtgcgatctgatcccggaacacatcccatgtgagcacgctgcccgaggcgtagtaccgggtgagcgtccccgtccagatatcggcggccctgcggaagctggtgagcagcgcgtcgggggaatctgcgggcgccgtgtcgtgcgcgaggctgcggacatggaagtatatgggaagcatcgattcgtaatcgagcacaaggtcgagcgtacagcggtcggcactttgaaacggatagtcgcgcaggtagagcagccggtcgtcgtagacgtacatcgagccggtgaaatcctccgagcgggccggcgcgcagtcaaagagttcgagcagcgcggcaacgtagctgttgaggctggaccatacatcgtcgctgtacgctgaaagcggtgtgcccggcccgccgatcacatcccacggcggcagggtgagttccgtgtcgccctcgagataaagcgggctttccttgcccgcgatcgcgacgcgctcggcctgatttttgcggtcggacacgagggcgctgaaaagcgccggggagaaaaagccgaccgcgagaatggcgccgcagagcagaagggggataaaaactgttcggaaaaatctcatggcaattcctttccgcgccgtcagccggtatagcccgcgagccgcgcgtcgaggccaaagccggtgattttctgtgcggcgccgtcgtagtacagcgtgtacggcgtgttgctgtaatcggtcagcacgatcaccgtctcgttctcgtagctgatcgcgtagccgacttcgaggtacccgggtgcaaagatggcttccgtccaagcggagccgtcgggctgaatcgtttcgcaggccatgaggaacgtgcagaactgcgagaccagctgcgcggcgctcccgctgcacgcgccgtaagcgagatccagcgaatcctgaaaccacagcatgcgggcgtctttatcggcggtataaatttccggccgctcggaaagctgcgttttccagaactggaaggcctcctgaaatgctgacagaagcaggtccggactcgccgccggatgtgttttatccgaaagcgggcgcacgtggacgctcagcggcagcgcggcgctgttgtcgagcacgaggccgagcgtgtactgctcgccgtctgtggcggtgtaagtgtagccgcgcaggtacagcagcgtgccgtcgagcacgcgcagcgcgctgaggaaattctcgtcctcggcgggaacggcggcgaacagcccgacaagtgaccggatgtagtcgttgacaaagtccccgtcgatctgcgccgcgccgaggtaatccgagagcaagacgctgctgccgcccgccgcgactgcatcccacggcggcagggcgatatccgtatcatcctcaaggtagagcgggctttctttgcccgcgatcgcgatgggctccggtgcgttcttataatccggtacggctctgccgaatagagcgggcaggccgaaacctgcggccaaaaccagtgcgcagagcagcagcgggatcaaaatggtgcggaatcgcttcatggcagggtctcctttttcggtcagggtatacggtcttgcagggcggcgtccatgccaaagccggtgattgtctgcgtggctgcattgtagaacagcgtgtacgggcggttcatcgtgtcgcgcagcacgatcagcgtttcttccccgtagggctgtgcggaaaaaacggcggaattcgtcgaatcccaccagcactgtgcatagccggaaaacgcgccgccctgagacagggggtaggtgctgtccgcaagaaaaagctcgtaaaagcgccgaaaggcgggcacggcgccgtcgttcggcagcgcttcaatttcggctgcggccggtgtggggccgctgtaaagcacgccccaccagagcctgcggaaaacattgaaatcctcccgcagcgcggcttcatcggcagcgggcagcgtcgggccgtcggtgcgccgcacatgcgcggaaagcggcgcgccgtccttggtgaggacgaggtcaatgcagaaatcgccgccgtccgctgccgtgtactcgaagtcccggaggaaaatcaaattgttgtggatttgcaggccgtcgctgaaggagacgtccgccgccggggccgctgcgccgaacggtgtgaggcaggccagaatatggacatctgcctcggcgtgccgctgtgcatcccctgcgccggagcgaaacagcgcggtgcaggagacggcgcgctcgagctcgatcgcgtcccacggcggcagccggaggccggcggggttttcgaggtacagcgggctttcccgccccgcgattgcgatggtttccggcgcgttcttgtaatccggcgtatggcgcaggagaagctgcgggagcgcggccccggcggcgagaaccgcggcgcagagaaaaagcggcagcaggccgcgcagccggctcacgggcggcctccgtggttctttctgcggcgcgcaggcgtggcggctgcctcgggctgcggcttttccgcctttccgggcagggcggccgaatcgggcggcgcgacgtccatgtggatcagaatcgtcgtgcctttgtggtagacggagcggatctccagccgcgcgccgtggcggcggcagatgtcgtcgcacagggcgaggccgaggcccgcgccgccggccttgcggctgcgcgccttgtcctccatgtaaaacgcctcggtcgcgcggcgcaccgtgtcgggcttcatgccgatgccctgatcgatcacggagagcacgatgtgtccgtccagcgcggactgcacaagccagacggtgccgccctcgggcgaggcctttgcggcgttgtcgatgagattgtagagcagcgagaggaagagctcgcggtcgacgcggagcaccgcgtccttgtgcagcagctcgagccggatgccgcggcgctctaggatcggcgccatcgtgtgggcgatgtccgcgaaaagctgaccggccgggacgtcggtgaggtcgagctgcgtgctgtccgtcgaggcgagctgcaaaagttttgcggagaggccgcgcaggcgctttgcctcctcgacgatcgtcgtcgcgtaatcgcggcgctggttgtcggaaacagcgctcttgatgcgcaggatgtcggcaaagccgaggatgctcgtcagcggcgttttcatctcgtgcgccatcgaatcggcaaagcgcttgcggctgtcggcgatttcccgcagcttctgctcgcgctcgtcgatggaggcggacatgttgttgatgctgcgcgcgagcgtgcgcagctcggcgctgccgcgctcgggcacgcgcaggctgtagtttccgtttgcgaccgcctcgatcgtctgcaccgaaaccttcagcgggtgcagaaagatgagcaccatcacgagcatggcggccgaaatcgccgcgccgcagagcagacccgtcgtgcgggcggaggtgaggtcctgttcgcgcgtggtgtacacgtcggtgatgtcgtaggcagtgtagagcgcgtagggcatcgtttcaagctgcaccgtggaggcgatgacgaggtacgtttcaccgccgacgtcgcagatcacggtctgcccctcgtcgatcgcgtcgctcggggcgagatcctcgagcaggtttgtttcgccgccgaaaagcccggcgccggccgatgtgaccgtgtttccgttcaggcgcacggtgatcgccgcggcggtggagatgtccgccgtcacggtgctgtggagcagttcggcgatctcatcggtgctcaaaagcagcttgccggccttgagccgctcgtaggcggcgtggttcgagagcgaggcgctgagcgcctcgtgggcggcgacggcggtctgccgctcgcgctggatggagttttcaaagctgcgctccagcacgagaaactgcgtgagctggatggcgagcatcacgaagatgagcgccgtcagcgaaaccttctgccatagcttcatgggccgtctcctttctccgccccggtcagccgcggcgctccaggcggtagccgagcttcgggatcgtgatcagctttccctgtaaaccgagcttgcggcgcacctgctgcacgtggatgtccaccgtgcgggattcgccggtgtagttgtactcccagacattcgagagaagctgctcgcgcgtgatcgccacgtcgatattgcgcatgaaaaatacgagcacgtcgaattccttcggcgtcagcacgacgggcaccccggcctttgtgaccgtgtggcgctcgatatcgacgcggatgtcgccgtagcgcaggcgcatctcgctttttccggcgcgccgcagcacgacctcgatgcgcgcgagcagctcgacagcctcgaagggcttgacgatgtaatcctccgcgccgccgcgcaggcccttgaccttgtcggcgaccgcgccgagcgccgtgaggaagatgacgggcgtctcgcagccccgcgcgcggatcgtatcgagcacggcgaagccgtcggcgccgggtagcatcacatcgagcagaatcaggtcgtaattccccgctgtgatgcgctcgacggcctcgaggccgtcgccgcactgcgcgtagctgtagccgccgatcgagagcgtcgctgccagcatttttgaaatattttcatcgtcctcgacgatcagaatctggatcatggttccaccgttccttcctgcatctccttttgccgcccggcaaagcccccgtttcggccgcgcggcggcctgttccaaacaggttgcgttgtctttattttaacacagaaaagggcgggcttcaactcggggaagcccgcccgcagaggacgccggacagtttttgcaaaaattttgcatttttcggggatgacggcacggctagcgccggagctgttttcggcacaggcccttttccccgcagtgcgggcaggtcagccgccgccttgtgatcgtgtggtacgccttcacgtattcgccgaacgtcggcgcgaaaagcgcgccgcagtgcggacacttgtagtaaccggcctgcacgtcgagcatggcggccgcaaagacgccggcggctgcggtggccagagccagcaggagcagggcgatccgcgcggcggctggcagcggggcaaaggcggcgagcgcggccagcgcgcagaccgcaatgatcgtgatcgcgccgcacaggacggagagcatcatccgtctcttgttttcttcgttttccctcatcagattcatcatgttttcctccgctcttttccggtaatccgtttcggaaacgaccgcgccggtcaacaggtcgttgacggtgatttgcagcgcgccgcacagcggcagcatcagcgaaacctccggcaggccttttccgcattcccacttcgaaaccgttttgtcgctgatggacagcgcgtcggcaagctgccgctgcgtgaggccctgcgccttgcgccgcgcggcaataaaccggccgattttagcctgatccatgggtttgcctcctttctgcctgtattgtacgggataaacggccggctgcacacacacggcgcgtagagcggcgcggctctacggagcgcagagtcgggaaagcccgtctcccgcgtgcagaaaagcgcgcttgtgcagaagccggccgacaaaaatgtcctccgggaaaaaccggaggacatcggttcaggtgagctctggaatgtagcggccgttctcgcgctcgatgcgcagcagcgagaagccgaacggcgggagcttgaaatcggcggggccgtccgtgtcgtttatgtacggtgcgccaaagatgaactgcgcgcggcggtaatccacgccggggatcacggcgttgtcgccgctgcggttgacggcgataaagagcgccttttcgccgtattccgtctcgatatagcgctcgaaggagagaatgtcgccgtgcgcgtagacgctgcgcagcttgccgtgctttaggatgtcgctgtgctcgcggcgcagcagcgcgatgtagcggtaccacgcgaggagatcctcctcctcgcgcccccacgggtagcacgcgcggttgaaggggtcgcggtagccctccatgccggcctcgtcgccatagtagatgcagggcacgccgggcagcatgaactgaagcagcgaggcgagccgcagccgctcgagcgcggtttcccgctggtcgggcgtcatgcgctgtgcgctctgccacgcgcggccgcgctcgcccgcgggttcgccgccgagcacggtcagcgcgcgctcggtatcgtgcgtgccgatgtggttcatcaggatgtcgagcacctgcggcggatagttttcgacgatcgtctcgatgcggtccatcatcagcgaggcgtgcgcaccgcagaggaagccgaggatcgcgtcgcggaacggatagttcatcacgctgtcgagctgcccgcccatcaggtagcggcggcgcacgccgtaggccgtcttgttcgaggcgtcctcccagacttcgccgagcacgagcgcgttttcgtcgaagccttttaccgcgcggttcaggctgtcgataaagcagtcgggcagctcatcggccacatcgagccgccagccggccgcgcccgcctcgagccagcggcggatgatgccgctttcgccgttgatgtacgcgtcataggccgggttgccctcgcgcacgttcggcaaggtgatgaaattccaccagcattcgtagtcgtccggccagcggcggaacgaataccacgggtagtagggggactgctgcgagcggtaggcgccgccgtctccgtagcggccctcgcggttgaaatagatgctgtcgctgcccgtgtggctgaacacgccgtcgagcaaaatgcggatgccgcgcgccttcgccgcggtacatagcgcgcggaagtccgcttccgtgccgagcagcgggtcaattttctcgtagttcgccgtgtcgtagcggtggttcgagtgcgattcaaagatcgggttcaggtagatgcaggtcacaccgagcgattcgaggtaaccgagcttctgctcgatgcccttgaggtcgccgccgaaaaaatcgctgttcgtgatctcccccgcggcgttcggccgccattcgggctgctcgtaccagtcgccgtgcatcgtgcgcccgtaggggacgtcctgctttttctcgcccgagctgcaaaagcggtcggggaagatctggtacagcacgccgcccgcgagccagtccggcgttttgaagtccgcggcgtacaccgtgagctgccagtcttcgctgccgcccgagcgcgcctcgccgccgatgtcctttttcagcacggaatggccgcgggaggtgcgcagctcgaagtggtagaagcacaggccggcgtgctgcggcgcgaagtggcactcccaccactcgtggtcgtcgccgttcatgccgcaccagaacatgtcgcagcagacagtgcggccgtcggcgtcctgaatcagcaggtaggcggcagagcaggccatgctgcgcggcacggtgattttaaagtggacgcgcgtgccggcctgcacggcgccggtggggctgcggtatatggggtttctggagttgaaaaaagtcatggcggaagctcccttgcggtttttctctgggctgcgttttcgggaaaaaggggcgccggagctgttccggcgcccctttgcaggctgcgtgtgcgggttatgcctttttcttttcggttgtagcgctgacgggctttgcgagccagatgttgttcgcgtaatcgcggattgagcggtcggccgcgaagatgccggcctttgccgtgttgacgagcgacatcgcgttccactttttctggtccttgtagaggcgctccgcctgccgctgggcgtcgctgtaggaggcgaagtcggcgagcgccatatactggtcgacgttgagcagcgcctgatgcagattcgagaaggtcttgccgtcgaagccgcggccgagcgcgtcgaccgcctttctgatgatgctgttgttctcgtactggttgcgcgggcggtagccggaggcgcgcaggctgttgacctccggcgtcgtcatgccgaagaggatgaggttgtcgtcgccgaccgcctcgaggatctcgacgttcgcgccgtcgagcgtgccgagcgtgatcgcgccgttgatcatgaacttcatgtttgaggtgccggaggcctcggtgccggcgagcgagatctgctcgctgatttcggcggccggggtcagaagctcggcccaggagacgcagtagttttcgacgaagatcacgcgcagcttctggttgacgcgcgggtcgttgttgatcgtgttcgcgaggcagacgatgaactggaggatctccttcgcgaaatagtagccgggcgccgccttcgcgccgaagaagaaggtgtgcggcgtgtagtcggcgttcgggttttcaagcagccactggtaaacagaaaggatgtgcagcgcgttcatgtgctggcgcttgtactcgtgcaggcgcttgacctgcacgtcgaaaatgctgttcgggtcgatgatctggccctgcgtgcgcttcacgtgctcggcaaggcgctgcttgtttgcgagcttgatcgcctgcagcttctcgagcacggccgcgtcgtccttataggccatcagcttttcaagctgcgtcgcgtcgtggatgtagccgtcgccggtcagctccgtgatgagcgcggcgagcttcgggttcgcctgattgagccagcggcggtgcgcgatgccgttcgtgacgttcttgaacttctgcggcatctcggtgtagaaatcgtggaaaacgctgtccttgaggatctcgctgtgcagctcggaaacgccgttcgtgctgtgggtcgcgagcaccgcgaggttcgccatgcgcacgtagccgtcgcacagcggcgccatgcgccagatcttgccctcgtccacgcccttatagcgcatttcgtcccaaaagcggcggttgatctcctcgacgatctggtaaatgcgcggcaggcgcgatttgaagagctccacgctccagcactcgagcgcctcgctcatgaccgtgtggttcgtgtaagcgatcgtgcggcggacgatgtcccacgccgcgtcccagctgtagccgcattcgtcgagcatgatgcgcatcagctcggggatcgcgagcacggggtgcgtgtcgttcaggtggatcgccgcgagcctcggcaggtcgtcgagcgagctgtgggcgtacaggtggcggcgcacgatgtcctgcacagaggcggaaacgaggaaatactgctgcgcgaggcgcaggctcttgccctcgtagtgattgtcctcggggtaaaggacttttgtgatcgtctcggccatcgcggtctgctccatcgcgcgcatataattgccgctgttgaagagcttcatgtcgaattcattcgccgcggcgcgccagatgcgcaggacggaaatgcccttgccgtccatgccggagacgtacaggtcgtacgggatcgcgagaatggaattgtagttcttgtggcgcacggagtggtactggtcgtgccactgttcctcgatgtagccgtcgaaatgcacctcgatggcgttctcatcgactttctgcatccatacctcgccgcccggcagccagaagtccggcagctcggtctgccagccctcgacgagcttctggcggaagatgccgtactcgtagcgcagcgagtagcccattgccgggtagccctgcgtggcgaggccgtcgaggaagcatgccgcgaggcggccgaggccgccgttgccgaggccggcgtccggctcctgctcatagagcgcgtcgagcttcgcgcccatatcggagagcgccttgcggaagttttcctcaaggccgaggttgaagaggttgtttttcagggagcgcccgagcaggaactccatgcagaggtagtagacctgctttgtgtcgctcttttctgcgttgcggacgaattcgtttctgccgcgcatcagaagatcgcgcacaacaagggcggacgccttgtaaaattcctcgtcgctggcgtttttagaggagacgccgtagatgtgagagagtttttcttggatcgccgttttcacctgtgcgaccgtcatgccgtaattcatgtagtacctcctaagttgttacagacgtaaaatacacgatatttgtgcatattgcataaaacaaaatactttagcacacaaaaacaaagggattcaaataaattatatactaaaaacacggtggattcaataccgaaccagacgaagtttgccatttcgctttgtatggtttttacagaaaaacggcgcaaaacgccttcccccgccgtatcgtcaaaaacacggcgggaaaccgggcgcaccgcgcggcccgctctgcttattataggatgtttttgaaaaattaacaagccgtttttcgtaaaacatcagataaaatgcgggttttcggcctttttttacagcgtgggcgcaaattttccccgtctccctttcctttttgcccgaaatgcaatataataaggacagaaaatccggcggctgcgcccgaagcggcgcgccatgcggaaaggaaggcagaattgaaaatggaaaagacgaggtgcaaactgaatatctgcggcgtggaggtcaccgtgtcgggcgatgcggaccgcgacgcggcggaacagatcgctggggcggtgcgcgcgcgcatggagcgggtgctcagcacagcatatgccgcttccgtcgaaaaggccgcggtgatcacggcgatgaacctctgcgaggagcttgcccggcgggatgccgcgctgcgggaaagcgaggaaaaggtgcggcagttagaggcggagctgcacgagatcggcggcgcggaggggcttcgccagcgcctgcagcaggcggagggcaagctgaaaatcgccgaggcgcagctccggcaggcacgggtacagccggcggcgcccgcggagaaaccggccggcatgccggtggagatgcgcaacccgctccgccaagacgttggagagcaggcggggcttgtcagctttttcgccaaggagtgaccggcgccgcgtatcgttcagcagaagtatgtgtgcggcgcggcgtgcgcacggggcgggaaaatcgaaatatccgtatgagaggagaaaacgaggcgcttgtatgcctcgttaggagaaccggaaatcagggtgaagcagacccggcccggcggcagagcgcttgaaacggaaatgcagggataggagaaacggatttgacaacggaaagaattgaagttctggcgccggctgggaacccggcggcgttaaaggccgcggtgttcgccggtgcggacgcggtgtatctgggcggctcgctcttttccgcaagggcgagcgccgtaaatttttcgaacgaggcgctgcgggaggccgtgacctttgcgcgtgagcgcggcgtgcgcgtctacgtgacggtcaacacgctcatcaaggacgcggagctttcggaggcgctcgaattctgcgcttttctgtgcagcctgccggtggacggcattttggtgcaggatgcggggcttttcgcgctcctgcgcgaggcgtgccccgaaatgccggtgcacgcctcgacgcagatgagcctgcacacgccggcgggcgcggcgcttttaaaggagctcggcgcgtcgcgcgtggtgcttgcgcgcgagatgtcgctcgaggagatccgcgcggtttcggcgcacacggacgtggagctcgaggcgttcgtgcacggcgcgctgtgcatgtcgctttccgggcagtgctatttcagcgcgatgctcggcggccgcagcggcaaccgcgggcgctgcgcgcagacgtgccgcctgccctttgcggcccccggcggcacgggacacgacctcagcctcaaggatatgtcgttcatcgagcacatcggtgcgctctcggccgccggcgtctgctcggcgaagatcgaggggcgcatgaagcggcccgaatacgtggcggcggcggtttccgcctgccgccatgcggcggacggcgagccggtgccgccggcacttctggaggaccttagcgcggtgttctcccgctcgggctttacggacggctacctgtccgcaaggcgcggacgcgggatgttcggcatccgcacaaaggaggatgtagagggcgcgtcgggcgcggtgtttgcaagcctgcacgaactgtataagacggagcggcagcgcgtgccggtcacgctttgcgcgcgcgttttcgagggggagtgccccgtgctcaccgtgtcggacggcgcgcataccgtgtcggtcaaggaagcggcgcatatctgcgagtcggcgcagcggcttccggtggacacagcgcgctggaaggcgcagctgcaaaagatgggcggcacgccgtaccgctgcacggcggtggaaatcgagaccgacgggcatacggcggtaccggtttcggtgctgaacggcctgcggcgtgcggcgctcgaatcgctcggcgcacagcggcgggaaaaaccgccggttccgttccgaatgcccgcgctcgacgtgcgcccgcacaagcccgaaaagctcgcgctgcgcggcgcgttccgcgatgcgcagcagattccggaaaacgcggcggcgctcgaccgggtcatcctgccgcttgaaacgcccgcagaaacgctcgatgcgctgcgccgggccgggcacgcgctgattctggaaatcccccgggcgctctggggcgtcgaggcgccggtccgggcgcggatggaagcgctccgccgcgagggcttcacgcatttctggtgcgggaacctcggcgccgcggcgctgtgccgggagctggaggtgtccgcgcacggcggattctccctcaacatcttcaacacgcagagcctgcgctttttcgaatcgctcggcctgtgcgacgcggaggtctcgatggagctgaccggcggggagcttgcggcgctcggcggcaccctgccgcgcggcacgctcgtttacgggcggcagccgctgatgctcacgcgcaactgcccgctcgccaattcgaaaaagggctgcctgcactgcaagcggccgctttcgatccgcgaccggcgcggcgtggaatttcccgtgctttgcacaaaatttgcgggaaagcccgttttttcggaggttttcaacagcgtgccgctgacaataacagacagcgttcgcgcgggaaacggcgcggattttggcgttttaaggttttctgtggaaaaagctgtggaaacaggggaaatcctgcgccgcgcgattcgacaggaaaagccgcattccgactatactcgggggctttttacacgcggcgtgctgtgagtgtggaaaactctgtggaaagcgtgcaaaactttttgccggcaggaaaaaaagaggcggaaaaaccgcagtgcaaagccaaaacagatttcaacagggctgtggaaacggttttgcacagcccgcccggaaaacggcggaaaaatcaggaggaaacgaaacatggaaaataaaagtgaagcgaaaatggttttaaagctgatgcgcgtgcgcgagggcgccgtgctgccgaagcaggcgacggcgggcagcgccggctacgacctatgcgcctgcatcgacgcgccgcagacggttccgcccggtgagcgggcggtgttcccgagcggccttgcggcggagatcccggcgggcacggcgggcttcatcttcacgcgcagcgggctcggcatcaagaaaggcatccatgtgacgaacggcgtcggcgttgtggacagcgactaccgcggcgagatccgcgtcggcctgcacaacctgagcgcggagccgtacacggtgcagccgggggagcgcatcgcgcagatgatcatcatgccgtatttcgcgccggagatcgtggaggtcgcgtcgctttccgagacggaccgcggcgcgggcggctttggaagcaccgggaaataaaggcttcaagatatggtgcggcgggctgcatgcgccgcatatcttgggatttttcaaaaaagttacaaattgtaaacttttgcggttgagaaagcgccgtttttttgctatactgtactgtgtaatttttgcggctccggcggcaggcggccgggcccggtggaggctttgacgcatgggtgcgataggttcggatattctcgcggggctcgcctcgcttttctcggtattttccagctcggtgaaggacatcggcatcgatctcggcacggcgaacacgctcgtttatgtgcgcgggcgcggcatcgtgctgcgcgagccgtcggtcgtcgcggtcgacgtgcgcaccgacgaggtgctcgccgtgggcaagcaggcgaaggagatgctcggccgcacgccggactcgatcgtcgcggtgcgcccgctcaaagacggcgtgatcgccgatttcgaggtcacggcggccatgctcaagtatttcgtgcgcaaggcgctgaaatcgggcgcgttcagccgtccgcacatcgtcatctgtatcccctcgggcgtcaccgaggtggagcgccgcgccgtggaggacgccgcgcgcagcgccggctccggcaaggtcgagctgatcctcgagccgatggcggcggcgctcggcgccggcgtcgcggttgaaaagccgcgcggcagcatggtgctcgatatcggcggcggcacgagcgaggtggccgtcatctcctacggcgacccggttgtgtccgaatcggtgcgcgtggcgggcgataagttcgacgaagcgatcgccgcgcacctgagaaaaaagtacggcgtcgtggtcggcgagcgcacggcggagcagatcaagctgcgcatcggctcggcgtacccgcttgaaaagctgcgcagcgtctcgatgagcctgcgcgcggcgagcgcggcggacggccagccgcgggacatcaccgtaacggcggaggacgtgcgcgaggcgctgatgctgccgctcaaaacggtgtttgaggcggtgcacagcgttttggagcgcacgccgccggagcttgcggcagacctgctcgagacgggcatcgtgctgacgggcggcggcgcgctgctgcgcgggttagaccgctttctgcacgaggcgaccggcctgccggtgcatatcgcggagcacccgatggactgcgttgcgcagggcgcggggaaaacgcttgagggcggggcgtatatccccgcgaacgcgcgccgggcggaggaagcctgatttttttaggaaggacggcctcggtgctgccggggcatggggatacgcatggaaaagttttcaacccgcacgtttaagatcctgatggttgcggcagtcgtactgctcggcgttttgatctacagcctgagcgcgggcagctcggttttctcgagccttttcggcacggtggccgcgccgctgctcacggcgggcacgaatatgacggagggcgcgaaggagttcgtcaatctcgacggcatgtcgaaggaggagcttcaagcgctttatacggagcttctcgaggaaaaccgcgtgctgcgcgagcagctcgtcgattactacgaggtcaaggcggaaaacgcctcctatgaaaacatcctctcggtcaaggacgcaatgcccgacctcgggctgacggcggcgagcgtcgtcgggcgagacccgggcgacgtattctacgatttcacgatcaaccgcggctcgctttccggcatttccgccggcgatgcggtcatcacggagatgggcgtcgtcggcgtcgtcgaggaggtcagcgcgacctcgagccgcgtgcggtcgatcctttcggaggagacgcagatcggcgccgtcgcgaaggagaccggcgaaaacggcgtgatctcgagcgacatccagtttgcgagcagcggcaaggtgcggctgaattacctgacgcgcggcacgcaggttcagcccggcgcgatcgtcacgacctccggcgcgggcggcatgttcccgagcgaccttctgatcggccgcgtggacagcgtggagcgcagcaacgccgattcgtcgttttacgcgatcgtcacgccgtacgtcgatgtaaaaacggtgtcggatgtttttgtcatcacgtcgtttgacggcaagggggacgtgcaggcgaacctgcccgagccgtcgccctccccaaaagcagaggacccggcgatgacggcgcagaagggcaacgattgaggcgcagcctgcccgggatccaatggatgctttgaggcgggcggtataaatcggcgcgcggcctgcccggcgggcgcgtgtgaaaagggaggtgagccgcatggcggaccggaaaaagtggatgcgctgggggctgtatgcggtgcagctcctgctgctgtttattttgcaggaaacgccggggcttctgccgcccttgatgggcgcgaagccgatgctgattttggcggcggcgctgacgattgcgatggtggaagactgcgtgccggcgatggcgttcggcattttcgcgggcctgctcgccgatttcggcggcggcagcgcgatgggctaccacgcgcttgttttcggcgtgctctgctttctgctgagcggcctgtgcggcacgcgcatccagatccacctgttcacggcggttctgatggggctttggagctgcgccgcggccgtcgtgctcgactggctcgtgctctacgtggcgcgcggctacagccttgcggcatacgcgctcctgaacgcgtacctgccgatctatttttacacgctcctgatgatcccgctctgctacggcttgcagcttttgagccgccgcattttcggcaggcgctgaaaaaacgcggcggatgcgggaatactgaatgaaaacgcggcggaaaggaggcggtgtcatgcgcagaaaatgggggcgctacatcgcgtgcggcgcgctggtgggcgcaatttttctcctctatatcggccgcctcggccagtggcagcttttcgacggcgccgcgtatgccgaggaggccgtggtgtcgggcagctttatcaagctgacgggcgcgcgcggcgagattctcgaccgcaacggcgaggtgctggccgggaaccgcccggtgtacaacatcgcatacagccgcctgacggaggacagcgaaaaacgcaacgagacgctgctctcggccgtgaagctgctcgaggcggtcgatgtggaatggatcgaccgcctgccgatcacggtcggcgcgggcggggactatgtgtttgataccgagcggcagggcgagatcgaaacgatgaagtccgccgagctgctcgacctgcctgcggatgcgacggcggccgcgtgcatggaggcgctgatcgagcggtatgaaatcgacaacacggcggacaaggccgacctgcgccgcatcgcctccgtgcgttacggcatggagcgcagcgcgttcagccgcacgaatccgtacgtgctcgcgcgcgacgtttcgatcgagacggtcgaggttgtcagcgagcgcgcgtccggtatgccgggcatagagacgcaggtggaccagacgcgcgaatacggcagcgacggcaccgcggcgccgcacgtcgtcggcacgctcggcgcgatctccgaggagcagtacgcggcggcggaggccgaggggaacgcgtattcctcggcgaacgtctccggctatgcctacacggacacggtcgggcagagcggtatcgaatcggttttcgaggagacgctgcgcggcaaaaacggccgggagagcatcgagacggattcgaccggtgcggtgatttccactacggtgacggatccgcccgaggccggcgattccgtgtggcttacgatcgacagccgtctccagcgcgcggcgaaccgggcgctggaggagcaaatctcggcggagccgacggaggactgcatcgcgggcgccgccgttgcgctcgacgtgaataccggcgcgattctgacctgcgcctcctaccccacgttcgatttgaatcgctacgtttccgacgacgaatacctgacggcgctctacgcggacgagacgcagccgttcttcaatcgaggactgaacggcatcttcacgccgggctcgagctttaagcccctcgtggcgctcgcggcgctcgaggaaaatgtgattacagaccgggaaacgcccgtcgactgcgacggcgcctaccacttctacgcgcccgactacgagccgggatgcctcggcgagcacggaaaggttaatctgtacggcgcgctgagccgctcctgcaacagctatttctacgacgtgggccgcatgctgacgatccacaagatgagcacttatgcggagcttttctcgctgggcgaggccaccggctgcgagctgcccgaaagcgtcggcatcatgtccgacccgctcgagtatacggagcgccacggcggcgatacctggtacgacggcctgacgattcaggcggcgatcggccagtgcgacaacatgtttacgccgatcgagctcgcgacgtactgcgcgatgatcgcgaacggcggcacgcgctataaaacgcattttctcgaaaaggtgaccgactacgaccgcgtgatcacgcgcgagacggcggagccggaggtggttttggaggcggagatctcggaaaagagctttgacatcgtccgcaggggcatgcggcaggtctgcaccgagggcacggcggcctccaccttcgccgatttcggcgtcgccgtagcgggcaaaaccggtacggcggaaaacgccgaccattcggacaacctcacctttatcggctacgcgccgtacgacaagccggagatcgccgtggcggtcgtcgtcgaatacggcggctcgggcgatgcggcgaaggagattgcaaaggcgatctttgaagcgtacttcttcggcggggccgagcccgcggcagatcagaacgcggcggatgcgcaggcggcagacaccgccggggcggatgccggcggtgaaatgtaagcttttgtttgcttcgacaaaaaatgaccgttagttttggggcagtatgctaaaatttgagaagttctatttttatttttgactattgtgtttttatatgttattatatctaatgaggtaatatctatgggtacagcaatcgttgtcacatccggaaagggcggcgtcgggaaatccacggtgtcgctggggctcgccgcacaatttgccgcaggcggcgaacgcgtgctgctgattgactgtgacgccggcctgcgcagtttggaccgcatgaccggcaccgaggaggcgctcgtgttcgacagctccgacgtcgttgcggggcgctgtgcgccggcggaggcgatttatccctgcgcgtcggcgccgggcgtttctctgcttccggccccgcagaacggggaggatctcgtacccgagcatgtgatgcgccgcttggtgccgatgctcaagcggtattttgaccgtgtcattttggattcgccggccggcgtcgggcgcggcttccgcgcggcggccgcagcggcggaccgtgcgctgatcgtgtgcagccctgaccccgtgtgtatccgcgatgccgccatcgcgcgcaggctgcttttgcagctcggcgtttcggagcagcggctcgtcatcaaccggtttcaggatgcgtatttcaggcgcatcgcggcggaggcgcccggcgagggggcgcagcgcagcgcactgcgcgatctcgacgacgtaatcgaccaaagcggcgtgcggctgatcggcattgtgcccgaggatcagcagctgtccgccgcgtttgcccgcggccggctgccggcggcggaagcccccggcttcatggcgctttcgcgtgttgccgcgcggctgaacggcgtgcctgtgccgctcgcaatataagcgggcggcttcgagataaagcaaattattcggaaaaatcaaagggaggaaattttatgaatattgcactgaccgcccacgacgcaaaaaaggagctgatggttcagttctgcatcgcttactgcggcattctgagccgccacacgctctgcgcaaccggtacgaccggcaagcttgttgaagatgcgacgggccttagaatccaccgctttctgagcggcgagcagggcggcgaccagcagatcgcggcgcgcatcgcctgcaatgaaatcgaccttctgctctttttccgcgattccatgcagccgcagacggcggagccgccgtacgacaagagcctgctgcgcctgtgcgacgtgcacaacatcccggttgcgacaaatatcgcgaccgctgaggtcctgatccacggcctcgagcgcggcgacctcgactggcgcgagatcgtcaagctgtaaaatggttgacaaccgcgtgaaaatgcggtaaagtatagaaaatatccggcgatgaccgggagaagtacctgcgtgcgccgcacgcacagagagcgcggtccgggctgaaagccgcgcgtgcggcgcgcagggaaagacaccccgcgagccgcgcgaaagcgcgttttccgcgttaaggagctttgaggagaaaggggcggagcctgcccttttcttgaaaaagggtggcaccacgaacggaattcgtcccttatctgccgggcagataagggattttttgcgtctggagggatggcatgaaagtcgtttttattgtcggcagcgcggcggtgggcaagatgaccgtcgggcaggcgctgatggagcggaccggcctgcggctgttccacaaccacatgatgatcgagccggtcatcgaaattttcggcgcgtacgacgggcagatcatcgaccgcttgcgggacgtggtttttgaagcgttcgccgcgtcggagcagtacgggatgatcttcaccttcatgtgggctttcgacgtgcccggcgactgggcgtatatcgagcacgtgcagtcgattttccgggcgcatgaccccggcgcggaattttattttgtggagctcgttgcgccgcaggagatacgcctgcgccgtaacgcgagcgaaaacaggctgaaaaacaaggcgtcgaaaaataacatcgcatggtcgaaccaaaggctcatagaggacgacgcaaagtacaggctcgagagcctcgacggggaaatcccgtttgaaaattatatgaagctcgacaattcggagctggagcccgcgcaggcggcccagcagatccagctgcgctttagcctgtagcggcgcgcagatttacaggaaggcttacacggagaccgggccgcatgcggcagagaggaaaaggaaagcatatggaactgatcacaaaggcgccgaaaggcacgaaagacatcatcccgggcgaatccgaaaaatgggcgctcgtcgaagacgtgatggcgggcgaggccgagctcaacggcttctccgagatccgcacgccggtgttcgagcacacggagctctttgagcgctcggtcggcgacacgacggacgtcgtcgaaaagcagatgtacacgtttttggataagggcggccgctccgtcacgctgcgccccgagggcacggccggcgcggtgcgcgcgatgctcgaaaacggcatgtacaacaacggcttcccgatcaagatgtattacaagacgtcctgctaccgctacgaaaagccgcaggcgggccgcatgcgcgagctgcaccagttcggcgttgagatgttcggcgcggcggagcctgcggcggacgcgcaggtcatcctgctcggcaagtcgatctttgagcggctcggcctcggcgacgacgtgcaggtcgcgatcaactcgatcggctgcccgacgtgccgcgccgaataccacaaggcgctcaagacatacttcaccgcgcacaaggaccagctctgcgagacgtgcaattcgcgcctcgagcgcaacccaatgcgcattctcgactgcaaaagcccggtctgcggcgaaatcgcgaagggggcgccgaagattctcgactacctctgcggtgactgccgcgcgcactttgagaaggtgcagagcctgctcaccgcggtcggcgtggaattcacggttgaccccggcatcgtccgcggcctcgactactacacccgcacggtgttcgagttcatctccacgcgcttcggctatgcgctcggcggcggcggccgctacgacggccttgtcgaggagatcggcggcaagccgaccccggcgctcggcttcggcctcggcttcgaccgcatcatgctcgcgctcgaggaattcggcgccgagttcccggacgacggcaagtgcgagctgtacattgccgcgatgggcgagacggcgcaggtgaaggccttccagctcgtgaacgcgctgcaccgctgcggcgtcgcggcggactgcgacctgtgcgcccgcggcctcaaggcgcagatgaagtacgccgataagatccgcgcgagatacacggtcgtgctcggcgacaacgagcttgaaagcagcaaagctgagctcaagaacatgaaaaccggcgagaaaaagaagctctcgatcggcgaggatttcatcgacgcgtacctcgcggagacgaccgcgcaggacgacctgtcgttctaaaatcgcagtaagctgcgggccgcgccgggtctcctgcacgcccgaaaaagcgcgcggggcagccgccggcgcgcttgcccacagaatttcagcccatattcaacacagagaaagaggaaaaaacatggttcagtccagaacacatacctgcggggagctgcggctctccgacgcgggaaagaccgtcacgctggccggctggatggaaaacatccgcgaggtcggcagcaacttcgccttcgtcgtgctccgcgatttttacggcacgacgcaggtcgtcatcgaaaacgaagcgatgatggcgcttgtaaagccgctcaacaaggaatcgacgatctcggtcacgggcgtcgtgcgcgagcgcgagagcaagaacccgaagcaggcgaccggtgacatcgaggtcgtgcccgcagagatcaaggtgctcggccgctgccgctacaacgagctgccgttcgagatcaaccattcgcgcgaggccgacgagagccagcgcctcaagtaccgctatctcgacctgcgcaacccggccgtgaagaacaacatcctgctgcgctgcaacgttgtttcggcgctgcgtcaggcgatgaccgagcacggcttcctcgagatcacgacgccgatcctcacggcctcctcgccggagggcgcgcgcgactaccttgtcccggcgagaaagcaccccggcaagttctatgcgctgccgcaggcgccgcagcagttcaagcagcttttgatgaccgcgggcttcgaccgttatttccagatcgccccgtgcttccgcgacgaggacgcgcgcggcgaccgctcgcccggcgagttctaccagctcgatatggagatggcgttcgccacgcaggaggacgttttcgccgtcctcgaggacgtgctgccgccgatcttcgcgaaatacggcacgtacgacgtcgcgtcctctgcgccgttcacgcgtatcccgtaccggcaggcgatggaggaattcggctccgataagccggacctgcgcatcgacttgcgcgtcaaggacgtcacgaatttgctttcgggctgcggctttggcccgttcgagggcaatatcgtgaaagccgtgccggtttccgactgcaagctcgcgcgcaaggctgtcgataagctctgtgccgacgtcgaggtgcaggccggccagaagccgtactggttcaagatggacgaaaccggcgcgatcgcgggcggcatcgcgaagtttatcaacgcaaatcccgagacggcgcaggccgtcaccgaggcgctcggcctcaagccgaacacgctcgtgttcctctcggccggcaagctgaccgacgcgcagaaaaccgccggcgtcatgcgccgcatgctcggcacggcgtgcgagggccacatggacaaggcgcgctacgaattttgctggatcgtcgatttcccgatgtacgagaccggcgaggaatccggcgagctcgagttctgccacaacccgttctcgatgccgacgggcggcatggagacgcttttgaaggccgagcgcggagagatcagcccgctcgacatcatggctgaccagtacgacctcgtctgcaacggcgtggagctctcctccggcgcggtgcggaaccacgacccagagatcatggtcaaggcgttcgagatggtgcgcctcggcgaggacgacgtgaaggcgaagttcccggctatgtacaacgcgttctgctacggcgcgccgccgcacgcgggcatcgccccgggcgtggaccgcatggtcatgctgctttcgggcgaggagtcgatccgcgaggtcatcgcgttcccgatgaacaagagcgcgcaggacgtgatgatggacgcgccgtccacggtttccaaggcgcagctcgacgagctgcacatcgcacttgtacccgaagaagaatgagtttttcaagcgaaatcaaggcgtatgcgggcgcgcggttttcggacacggatttcaccgacgcttcgctgacaggctttacctttcagaagtgcgatttccgcggcgcggtcctttcgggcgcgctgctcgaaaagtgccggttttcggcctgcgcgttcgattttgcgcggctgaacgacgtgctgtgccgcaatacggcctttgaaaactgcacgttttccggggcgagcctctttgtctctgaattccacggctgccggtgcacgggctgtaattttgcgggcgccgatctcacaggctgggtcgtgcgcagcggcgcgctcgaatactgcgtgctcgacggctgcatgctccgcaagcaggattttgcaggcgtgaacctgcgcggcacgaatttcagcgacgccgaccttgagaaggcaagcctttcgggctgcgacctgacggagacggtgttccgcaatgcgaagctgaagggctgcgacctgcgcggcgcgaagtgggcgcgcacggatatccgctttgcaaagctcggcgatacggcggttgacctcgacggcgcggtgtacctcgcgcactgcctcggcgccgtcgtcaaataaatgaataagccgtgctgcgcgggcgtagtccgcgcggccggatgaaagggccgccggatagtcaaatcgggcggcccttttcgcgccccgcgcaaaaatacggcgccgccgcacaggccgccggaaaggaaaaaacggcgtaaagcggcggagcggaagtcgatttccgggcgcaggcagtttttatattatgttttaatttttggtatattttgattgacataataaagcaggcacaagatattgtagatcggctcttgacacgccgcaggaaaaggaatataatcagaggcacacggaaaacggtaatcggccgcgccggaggaaaaatcagaaggggtctaagcaggatggtcaagtacattgtcaagcgcaacggggaaaaggtttcctttgacgcaaagaagattcgaaacgcgatttttaaggccaatatccgcatcgcggcggagcgcatgagcgatgccgatctcgacagcctgaccgcggaggtgatcgaagcgttcggggacagcaagaccgtgccgacggtcgagcagattcaggacgtcgtggaggagaagctgatcgccgcggactacgccaagacggcgaaggcgtacatcctctaccgcgcggagcaccagcgcctgcgcgagatggacgatgagctcgtgaagatctatcaggatctcaccttcaagcccgccgaggacgcggatttgaagcgcgaaaacgcgaatatcaacgcggattccgcgatgggcacgatgctgaaatacggctcggagggcgcgaagagcttttacgacaaatacgtgatcccgccggagatcgcaaaggcgcacgccaacggcgacatccacatccacgacaaggatttttacacgctgaccgagacctgctgccagatcgacctcgtcaagctgtttgacggcggcttttccaccggccacggctacctgcgcgagccgaaggacatccgcagctacgcggcgctcgcgtgcattgcgattcaggcgaaccagaacgagatgcacggcggccagagcgtgccgaacttcgactacgcgatggcgctcggcgtgaaaaagacgttccgcaagcagtatttctcggcgctcacccagtatttcgaggtgcgccacaatatggcgcatgcggacgcggcggggcttgcggaggctgtccgcacggcgctcggcggcgatgtgacgatcggcacggcgaaggcgtacgcgcagcgcgtggaggaatttctgccgcgccaccagcgcgaaaacggctttgaggaaatcatcgccgaggaggcgcgcgacgcggccgactacgccgagcgtaccgcatggcgcgagacggacaacgcgacgaagcaggcgatggaggcgctcgtgcacaacctgaacacgatgaattcccgtgccggcgcgcaggtgccgttcagctcgctgaactacggcaccgatacgtcgcccgagggccgcatggcggtgcgcaacctgctggacgcgacggaggccggcctcggcgacggcgaaacgccgattttcccggtgcagatcttcaaggtcaaggagggcgtcaactacaacgagggcgacccgaactacgacctgttcaagcacgcgatgcgctgctcggcgaagcgcctgttcccgaacttcagctttctcgacgcgccgttcaacctgcaatattacaagccgggcgactacaacagcgaggtggcgtatatgggctgccgcacgcgcgtgatgggcaacgtgcacgacccggagcgcgaggtcacctgcgggcgcggcaacttgagcttcacctcgatcaacctgccgcggctgggcattgaagcgaagggcgatgtcaaaaagttttacgagctgctcgacgcgcagctcgcgatcgtcgaggagcagcttttgcaccgcttcaagatccagtgcagcaagaaggcgtacaactacccgtttttgatggggcagggcgtgtggatcgattccgagaagctcggccgcgacgattcagtggcggaggttttaaagcacggcacgctttcggtcggcttcatcggccttgccgaaacgcttaaagcgctgaccggcaagcaccacggcgagagcgaggagagctggaaattaggctacgagatcatccgctatatgcgcgcgtgtatggatcaaaagagccgcgagacgggcctcaactggacgctgctcgcgacgcccgccgaaggcctttccggccgcttcctgcgcattgaccagaaaaaatacggtaagattgagggcgtgaccgaccgcgaatactacacgaattctttccatgtgccggtgtactacggcatcagtgccttcaagaagatccaaaaggaggcgccgttccacgcgctgacgaacgccgggcacatcagctacgtcgagctggacggcgacatctgcaagaatatcgatgcgtttgagagcgtgatccgctgcatgaaggaggccggcatcggctacggctcggtgaaccatccggtcgaccgcgacccggtctgcggctacagcggcatcatcggcgacgtgtgcccgcgctgcggccgccatgccggcgagggcgtcccggtcgagaagctcgccgagctgcgcaagaagtaccacgacgtgccggattattcgcacttgatccgatgagcagcgaaggggacgggtttatgagagtttttctgatccgacacgcggagagctacagcaacacacaggggcggatgatgtccacaacggatcttgcccttacggaaaagggaatccggcaggcggagcgcgcgggaatcgccctgcacaccgcgttgcggggaaaggagcggctctatgtattcagcagtccgctgctccgcacgcggcagactgcggaggcggtgctgcgtcagtttcccgctgcgcccgcagtccgtgaaaccgcagatctgagggaaatggacctgggcttgctggagggcctgacctggcaggagcgggatcgcctgtatccgcaggtatgtctggaaagggggctttccgaagcggaggcgccgggcggagaatcgtttgcagatgtccagcggcggtgccggcagttcgtggacaaatcgcttgccgagcttcccgattccgcggccgttttggtcttttcgcatggaattacgctgcgggtgctcacaaacgtcctgctccggcggccggccggcgatgtaaaccggctgaactggatggagcacacggcggtaacggaaattgcctgcgacatgcagaacggcggtgcgcgcccggtgcgcatcaacgactacacgcacctgaaggagctttgcacggcggactttgcccggtggggattgtttgccggtgcagaatattgaactgcccgggagagcgggcggcagacacagatacaggaggaaaagcatatggcaccgaagatcaaggaaaaaaccgtgaaggaaaacgccgttctgatcggcgaggggcgcgatttcgagcgcatccgccgcattacgggctatctcgtcggcacaacggaccgctggaacaacgcgaagcgcgccgaggagcgcgaccgcgtgaagcacagcctgtaaacgcgcgagaaaatccgaaagccgcggcttttggatttttttgtgcctgccgccaaagcgctttcaaagcggaagcggcggggagaggagaaaggccatgaaaatcaaagttgccgggctcatcccggattcgatcgtggacgggcggggcatccgcctgaccgtattcgtgcagggctgcccgcaccgctgccccggctgccacaacccgcagacgcacgattttgagggcggcgcgtgggacgacacggaccgcattttcgaggcgtttttggaaaatccgctgctgcgcggcatcacgttttcgggcggcgagcccttctgccagccgaagccgctccgggtgcttgcggaccgcgtgcacggcgtcgggaaagacgtcacggtttacacgggctggacgctcgaggcgctcgaggcgatgcacgacccggatatcgacgctttgctcgccgcctgcgacgtgctcgttgacgggccttttatcgaggcggagaaaaacctcgagctggcgtttcgcggcagcgagaaccagcggctgatcgacatgaataaaacgcgggaaaaggggcgcattgtgccgcttgacctcggcggctgacagcccgcgtgctttcgctgcgcgggattccgggggctttgcgtctgcccgaatgaagcgcagtccgtttgaggcggagaagccgacagtgatatgaaaaaaggcttttccatatgataaagatatgtcaatatatcgaaattggaggggcgaattcacaaattggtgattgattccccaccgaatatgtggtagaatgaaagcagaataggtcatttgcaatacatttgccttttcggcgaaaggagaaataagaatgacaaacaacaagacagtcctctcttggattgacgagatgaaagcgcttgtcaacccggatcagatcgtttggatcgacggctctgaggagcagcttgaagccctcagaaaggaagcctgcgcgtctggcgagctgatcaagctgaacgaggaaaagctcccgggctgctattatcacagaaccgctccgaacgacgtcgcgcgcgtcgaggacagaacgctcatctgctccaagaaggaggaggacgcaggcccgaccaaccactggaaggacccgcaggaagcctataaaatgctttacgacatcgcccgcggcagctacaagggccgcacgatgtatgtgattccgtactccatgggtccgatcggctcgccgctcgcgaaaatcggcatcgagctgaccgactccatctacgttgttctgaacatgtccattatgacccgcgtcaacgcgaaggttctggatgtgctcggcgacagcaacgactgggttcgcggcctgcactgcaagtgcaacgtcgatccggagaaccgctggatctgccagttcccggaggacaacacgatcatttccgtcaactccgcttacggcggcaacgttctgctcggcaagaagtgcttcgcgctgcgcatcgcctcctatcaggcgaagaacgagggctggatggctgagcacatgctgatcctcggcgtcgagaatccgaagggcgaagtcaagtatgtctgcgcggcgttcccgtctgcctgcggcaagacgaacctcgccatgatgatcccgccggagggctacaaggcgaagggctacaaggtctggaccgtcggcgacgacatcgcttggatgcgtcccggcgaggacggcagactgtacgcgatcaacccggagaacggcttcttcggcgttgcgccgggtacgaacatgaagtcgaacccgaacgcgctgatttccacgcagaagggcacgatcttcacgaacgtcgcccgcaacctcgacgacaacaccgtttggtgggagagcctcgataagaacccgccggtcaacgcggaagagtggaagggcgcgaaggtgaacggccccgagtacattgccgagggcaataagctcgcgcatccgaacagccgcttcacggcgccgaccgcaaactgcccctgcctctcgagcgagttcgagaacccgaagggcgttccggtttccgccatcatcttcggcggccgccgtccggatacggttccgctggtttaccagtccagaagctggaacaacggcgttttcatcggctccatcacgggttctgagacgactgctgcggctgccggtgcagtcggcgttgtccgccgcgacccgatggccatgctcccgttctgcggctacaacatgggcgattacttcaagcactgggtcgagatgggcgagctcctcggcgacaaggcgccgaagatcttcaacgtcaactggttccgcgtcgatgaggacggccacttcatttggccgggcttcggcgacaacctccgcgtgctcgagtggatgctcaagcgctgcgacggcgagatcgacgcagtggagacggcgatcggctatgtgccgaaggccgaggacatcaacatcgaaggccttgacgacttctcgatcgagaccctgaagggcatcctcgaggtcgataatgcgaagtgggctaaggaagccgccggtgttgaggaattctacaagaagttcggcgataagctcccggcggagctcagagcagagcttgatggcctcaaggcgcgcgttcaggcgtaagccgcaggctgtaaaatagcgaaataggaaccgccctgtgggaattccacagggcggttttgctgtgcagtttttcgggcggcgggcgttttgcggtcgaaaacggcttaaagcgttttttcgcccatccagtacgccatgcagcgcttggcgccaagcttgccgtaccagtcctcgagccatgtgtagccgatgtaaacgcgctggatgccgcgggccttgaggcggtcgagcgccgtctggcacagccgcatgccgacgccgcggttttgaaacgcttccagcacgccgagcgggccgaaggcgctcgtctcgggatgcgattcggtgtaaaagcagttttccggggaaacgccgcagccgccgatgaccgcgccgtcccactcggcgagcagaatatccggcagacaggcgaaatagctgccgaagctcccgatctgcgcgccgcatgcgccggccttttcccgatcctccggcgtgtcgggccgcatccgcagggtaagcgccgggtcatggcagtcgagctccgggcggtgcgcgtaggcggcgaggtcgagcgtcatgtcgcaggccgtccagatgtattcgtagccgcgcttttcaaagaacgcgtgcgcgtccgaatcgccgcccatcggcacgccggggaagatgtaggtatccggcgcgtggccgagcacggcgcggccgtatgggcgcataagcgcctccgcctgcttcaaaagcgcggagccgacgcctcggttcctgcattctggctgcacgcagagcagaagcagtgcgttcctccgcacaacggcgaagcccgcgggcaggccgcccgcgccgtaatggatcagcacctgtgagcccttgccgataccgagccgctttttgagcgcggcgcagtccgtgcgcagggccggaaagcacatgttgtagagcgcgtgcagcgcgccgaacagcgcatcgggcaggtcgggcagctccgccgcggcaatcagcatcattgggcggcgcatttcgtccgccatgccgggcaggtcgcgcatcgattcaggcggcatcggctccttcacgtggcgcagcgtgaagccgtattcgagcagcgtttcgagatacgtcgtcgcggtgcggtggtatttcgtcatcgtctcgccgaggaagtgcgcggtacgcggcccctcgcggtagtagttgtctacggggaagtgcctgatctcgccgttttccccgtatacccaatcctgcgaaccctcggcggtgaaaacgggatgctcgacggtaaagatgaactgcccgccgggccgcagccagcggcgcaccttttcgacgacggccgggtaatcggcgacgtagtgcagggaaagcgagctgagcacgaggtcgaagctgttttcggggaattcgagcgattcgatcgcgccgtgccggtattcgatgcgggcggaaagccgcgcgtcgccggcgattttcccgcgcgcgacctcgagcatgcgcgccgagagatcgacgccgagcaccgattccgcgccgttttcaacagcccaaatgcagtgccagccgtaaccgcagccgaggtccagaacgcgcctgccctcgaccggcggcagaacgctttcgagcgtctcccactcgcccgcgccggccagcccctcgcgcgagcgggtcatctcgctgtatttttgaaaaaacgacggatcgtcgtaaatattttccttcaattcgatcgcctcctgctttcgtttgtacccattatagcggagcccggcgcaaaagccaagcggttttacaaaattatgcggcgccgcgccgcagggcttgcggattgggccgaaatgtgcgatactgtttaaagagaaattttgggaggagaagaaaccatggcactgacgtataggaccatcacggaaacgctcgatttcgggccgcacatcacgaagatcattctggaggcggggcggccgctcaccggcgcgaagctcgacccggcgcagttttccgtccgcaccgagcgcagggcaaagcccggcgaggcgttcacttggccgaaattcatgggcgagcgccctgacgacctgatgcagggtacgcgcacggtcgaaagcctatatgtatcggatgaaaacggcgggccggatgcggacgggcgctgcatcacgctctgcatggcttgctcgccgctcgcgggtatcggctccgtcatccagttcgacggcaatttcaacgtgtttctcgacgtgcacaacgtaatcacgcagacggcgccgatcgagacggcagacggcgtgatttccggcctcgtgttcgacgcggacggcggcaaccgcatggtatatgccgagtggctgcaaaccggcgcgtttgcgcaccccgattccgatctgctctacgcgcactacgagccggcgcacacggcggcggaaaagctgccgctcgtcatctggctgcacggcgcgggcgagggcggccactcgccgctgatcgctgcggtcgcgaacaaggtcgtcaatttcctgtcgcccgaattgcagtcgtatttcggcggccgctgcgcgctgctcgtgccgcaggcgccgacgatgtggatggacgacggcagcggggaatacacgcaggacggccattccaaatacgtttcggcgctcgacgcgctgatcgaggcgtaccttgcggcgcgaccgtggatcgaccgcacccgcgtctacatcggcggctgctcaaacggcggcttcatgacgatgaagatgctgatccatacgccggggcgctatgcggcggcgttcccgatctgcgaggcgctgcgcgacgactggattaccgacgcgcagatcgaggcgatcgcgaaaaagccgatttggctgacgcacgccgccgcggacgacaccgtgccgcccgagacgcacgtgctgccgacgtataagcgtctgaaagcggcgggcggcgagaatgtccacctcacctactgggacaaggttatcgacctttccggcagatacaaggggccggacggcgcgccgtttgaatattacggccactggagctggatctacatgctgaacaacgaatgcaggctcgattttgacggcaggcccgtcacggtcggcggcaggcccgtgacgatcgtcgaatggctcgccgcgcagaggtgcctgtgatggggcgggcagaacgcatgcgcagcccggaagaatttatgcgcaccgtgctggatttcgcggaggcggacgcgcacatccgtctcgtcgggatggagggttcgcgcgtcaatgcgaacatcccgaaggacgagtttcaggatttcgacgtcacgtattttgtggaccgcatcgaggacttcacgcagagcgacgactggctctccgccttcggcgagatcgtcatgatgcagaagccggaggacatggagctgtttccggcggaggaaacgggctactcctacctgatgcttttttccgattacgtcaagatggatctgacgctgcttgaaaagcgccatctgccggcgtatctcgccgcggacgggctgtgcacgattctgctcgacaaggacggcgatgtgccgcagccgcctgcgccgagcgaccggcggtatcacctgcaaaagccgagcgcacgcagcttcgacgactgctgcaatgaattctggaacctaggcacctatgtgacaaagggaatctgccgcggcgaacggctgtatgcggcggacctgatgcagctcatgcgcagcgagcttctgcgcatgctcgcgtggcaggtggggctgcgccgcggctacacgttcagcatcggcaagaactacaagttcctgccgcagtatttggaggacgaaacgcgcgaggcgctctacagcacatatcggatggattccgccgaagccctctggcaggcgctcgagacgtgccagcggctgttccgcgcggcgtcgggggcgcttgcagcggcgctcgggtatgcgtacccgccgtatgaccgcagcataacggcctatacggcgcactacaaggcgcgctttggaccgaaataagacaaaaagccccgccgggttcttatgaacggcccggcggggcttttgctgcctccggttctgcgggaggctgcggaatgcggcgatcagccggtctctgtcagcgggaaggtgatttcccagccgccctcgatcagcgtatcggcggtgacgaagctgccgtacagcgtgcagtctgcgagctgtgcgggtgaaacatcaaagacgtactcctcaaagctgtcgcttccgttctcggcgaaaaagctgaggctgccgaggcattccagcttttcggccccgttctcgagccagagctggccgtggttgtcggtttcgtggatgttttcgtacagcacctgaatgtgcagcaggccgtcgatatagcccatcgcggtgacggtgacgccgggcgccggcgcggagagcgtgccggtcgggacgagcatgtcggcggtatacgagccgtcgattttgctgcgcagtacgtcagccgaagagccgccgaagccgcgcagcgctgcccgctgcgtgtcgggctccgcctgcgccgcggcgaggtcgagccctgtgacggcgccctccgtttccgttttgccggtcaggagccggccgagcgaaaaggtcagcttgtcgccctcgatgtcctgcccgtcaaagcgtgtgatcgagatcagaaagcgcgcggtgcgcgtctgcgcgtcgtagccgacgcgtgagcaggtcgccgagcagtcgaagccgcggttgatgcggtagctgtcgaagaggtcggtcgtctcgtcgaggcgatcgccggtgaggtcctgcagggcgacgtagacctcgacggtgtcgctgtgcaggtagacggaatcgaccgtgaggcggatgccgttgtcctcgtcgctccggttcacgggcttgaagaactgcgcggcggcgggggagatgctgtagagcagcgcgtagccgctagggtcggcggcgagcgccggcatggcaaacgcgggcacggtgagcgcgaggcagatcaccgcggccgcaagcgcgatcagcgggcgcagccgtctggggcgggctggcgctttccgcaccgccgcgcgggtctgccgcagcagggcggcgtccggctgcacatcgctttgcatggcgctgtatttttcccgtagggtcatggtgttcatcctttctgtgtcaggcttcgtcccgaagaagatcggcgaggcggctgcgcgcacgtgtgagctgcgtgcgcaccgtcgatggctttcggtgcagcagcgcgccgatctcctcggcggtgtagccctcatagtaaaagaggtggatgacggtgcggtatttcggcgcaagccgcaggagcgcctcgtgcagttccagcgattccggtgcggaaaacggcgcggcgtccgccgtctcctgcggctcgtgcggcattttggagaggcagctcttcgcgcggttgatcgtcacgcgcagcagccacgccttgcggtgctcctcgctctggaatgcgggcgcgcggcggtagtaccgcaggaaaacctcttgaaaaatgtcgtctgcatccgccttgctgcgtgcgtaggcgaaggcgagccggtagaccatattgccgtaccgctcgaatacgtcctcgagctcgctttcggggatgtcccgcatgcgtttttcgcctccttctgtttttttgaaaaacatgcttttcactaagaataccctgcggggtggggaattgctacaggaaattaaaatttttttggaaagcaaagtgggagccgtccgcggacggctcccaccgattttatatagattgcgctgaagccggcttcatgccgcagcgctgccgggatgatgtgctcagcgcaccttccagcggtcgttgtaggtgccggagaggtcggcgatcttgccctcgtcctttgcctccttgacgtgcgacacggcgcggcgctcgtcaagcagctttaaaaacagttccttgtccaccggcacgtcctgcggcttgccggtccagtcggagaggtggatcgcattcgagatattgaggccgttgatgccctcatagcccggcgcgagcagctcttcgccgtgcagaatcgcgttcgtgaagttctgtagaatgccgttgtgcccgagctcgatgttctccgtctcaatttccgtgacggtcattttcggctgcgcaaagccctcggggcaggtgaagcagaattcgcgctccggcgtctcgagcgcccagtgcgtcagcttgccgtcctcccagacgagcttgcccttgtcgccggagatctcgaggcggttcgtgccggggcactcgccggtcgtcgtgatgaacacgccggtcgcgccgttcgggtactcggcgtaagccgtcacctcgtcctccacctcgatgttgtgccagcggccgtatttgcagtgcgcgctgatcttgttcggcatgccgaaaatccactgccacaggtcgaggttgtgcgggcactggttgatcagcacgccgccgccctcgccggcccacgttgcgcgccatgtgccgctgtcgtagtaagactgcgtgcggtaccaatttgtgatgatccagacgcagcgcttgagctcgccgagcgcgccgctctgcacgagctcgcgcattttctggaacttcgggttcgtgcgctggttgtacataatgccgaaaaccctgcccgatttttttgcggcctcgttcatctcctcgacctgcttcgtgtagacgccggccggcttttcggagagcacgtgcatgcccttttcaaagccgtagatcgcgatgggggaatgcaggtagtgcggcgtcgcgacgaggatcgccgtgcacaggccgctgtcgatcatctccttgtagtcgatgaagcaggggacgtccggcaggttttccgccgcccagagccgcttcgattctgcgatgtcgcagaccgcggcgagctccatgccctgaatgtttccggccagaatgctcttcgcgtgcgcggagcccatgttgccgatgccaatgatgccgatttttactgtttcgctcatttcttgcaactccttacagattgattttttcgcagatcgcgtgcagcgcatttgcggcggcgtcgaacgcctcctcgccggagcggtacacgcgcttgtgtgtgagttcctcgtcctgcaaattcgagaggccgctgaaatcgaacagatgcggctcgagcgtcaggatgtacggcctgcccgtttcggcgagcgccgcgagaagctgcggcaccgagccgtcgccctcgccggccggcacgaccgagccgtccgcaaacagcgcgtccttgatgtgcatgtagtcgatcatcggggaaagcgccttgaaattcacggcggggtcgtcgccgcactggatgtagttcgccgggtcaaacacgcagcgcaggccgggcacggccgcatgcagcttctgcacgcgggcgagcgtgtcgccgtaaatacccttttcgttttcgtggcagcagtgcacgccgttttcctcggcgtaggcgacgagcgccgaaacgcgccgcacgacctcgccgaaatggctttccgggtcgtcgccctgcgggataaagaagctgaacatgcggatgcgggcggtgccgagccttttcgcgatctcgaccgcgcgcttgaatttctcaaaatgcggggcgaaatcgtccagaatactgatcttaccgatcggcgagccgaccgccgaaacgccgattccggcctttttaagcttctcacagaccgcatcgagctccgcgtccgtgaggtcgagcacgcccttgccgtccacgccgcggatctcgagcagagggatgcggttgcgggcgagcgccgcgagctgtgcgtcaaaattcgggtcggcctcgtccgcgaaggcggagagagtaaagttgagtgccatgggtgtcctccttttagaagctgcaatttgccgcgagcaggttcttcgcgctgagcgcgagctcgtcgaacgggtcgcggtcgtagcagtcgtcctgctcgatcatcgcgtaatggatgcccgtttccgcacaggcctcgaggatcgcgtcgaaatcgaggttgccgtccataacggcggcgaagcggtgctcgtgcccgtgcattttcatgtccttgaagtggatcacgtcgatgcggcccgcaaggcgctcgatctggcgcgccggagagcgtccgccgaactgcgtccagtacacgtcgaggatgaagccccatttttcggggtcggtttcctcggccatccagtcgatcaggcacttgttttcgaactgctcgtactcaaagccgtggttgtggtagtgcagcttcatgccggcgtcgtgcagcttgtcggccgccggggcgaagtcggtcaaaaacgcgcgcatgccctcgagcgagccggtgtatttctgcggcatcatgccgatgccgacgtgctcgcagcccatgatgcggtggttttcgatgacctgctcggtgttttcgaggatgaactgcgggtttgtatgcgtgatgatgatcttgaggtcgttttcgtcgcagatcgcgcggatgatgcgcgggtcgatgtcgccgaacgcggagacctgcagtgtcttgaagccgatgtcgtgcagctttttcgccgtcacgcggaggtcggcctcgttctgtgcaaaattgcggatcgtaaagccctgtgcgccgataatcataggaaacgtcctttctgcggcgtgcgccgcctgtataaaattcagattaaacgccggagtaggcggagaagccgccgtcaaccgggatcgtgatgccggtgatgaagcccgccgcctcgttgtcgatcaaaaagcggagcgtgccgagcagctcctcgggcttgccgaagcggcccatcggcgtctgcgagatgatcttgtggctgcgcggcgtgaggctgccgtccgcgttgaagagcagcgcgcggttctggttcgtcgcgaagaagccgggcgcgatcgcgttgacgcggatgccgcagttcgcaaagtgcacggcgagccactgcgtgaagttcgaaacggcggccttcgcaccgctgtaggccgggatcttcgtcagcggcgtgtaggcgttcatcgaggagatattgacgatggagccgccggtctcgagcatgtcgcgcgcgaacgcctgcgtcgtcagcagcgtgccgagaaagttcaggttaaagacaaacgagacgccgtccttgtcgaggtcgaagaaggagcgggcggtttcgtcgagcaggtcggccttgtcgaagtattcgccggtcgtcgtgcccttcgggttgttgccgcccgcgccgttgacgagcacctcgcagtgcccgaaggccttttccacggcctcgtgcgcggcggcgaggctctcggggtcgagcacattggcctgcacggcgacagcctcgccgccgtttttgcggatctccgcggcggcggcttcggcggcctctaggttcaaatcgagcagcgcgaccttgtggccgtccgccgcgagcgctttggcgaaggcgctgcaaagcacgccgcccgcgccggtgatgacgatattcatgagcaattcctcccttttatctggttccgcacggctttgcggcaaagcgcgccgtgcgggcctgcgggccgaagcgtgttgcgggcccgcagagcggttatgcaaacagcgcgcggctgttttcgacgcagaggcggcggagcagcttcatcgcggccgcttccgaaagcagcgtgccgccgtcgagctcctcggcgatgcgggcgcacagcacgcggcggaagtaatcgtgccgcgcgtaggaaaggaagctgcggctgtccgtcagcatgccgtaaaactgggcgaggtggcccgtttcggccagtatgttcatctgctcctccatgccgcgtttgtggtcgcagaaccaccatgccgcgccgggcacaacgccgcggaagctgccggcggtcgtcgcgatcgccatgtacatcgagggctcgagcgtgtagaggatcgtgcgcggcaggccgtccgctttgtccatcgcgtcgagcagagcggcgacgtcgcgctccgggatcgggtcacccacgcagtcgccgccggcgtcggggccgaccgattcgaacaggcgcgtgcaggcgttgcggcgcacattcaggtgcagctgcatcgtgacattgtgccgcttgtattcggcggcgaggaacacgtacatttcaaagaggaaatcgcggtattcggcctcggcgacgctttcgccggcgagcgcccgtcggaaggtctcggcggcgcagcaggcggcgtcccgctttggaaatgcctcgatgccgatgtcgctgacgcggcagccgttcgcacagaagaaatcgagccgcgcggagagcgcctttttgaggtcatcgagcgattcgaccgcaaagccgcaggcgtccgaaaggcgcgcgaggtaggcgcggtaatcggcgcgcacgatgttgagcgccgcgtccgtgcggaacgacggcaccacgcgcacggaaaagtccttatcctgcgcgatcaggcggtggtactcgagtgaatcggccgggtcgtcggttgtcgcggcgagctcgacgcggctttgcgccatcagctttcgcggcgagagcgcgtgcgcccggatgtaatcgttcgcgcggtcgaagatgccgtcggccgtctccgccgagagcgcatcctcgatgccgaagaacattgaaagctccatgtgcgaccagacgtacagcgggttgccggcggcggtctcgatgcagtccgcataggcgcggaacttctcgcgcgcgggtgcgtcgccggtgatcaggcgctccggcacgccgcaggcgcgcatcaggcgccatttgtagtggtcgccggaaagccagacctgcgcgatgtccgtgaacaccttgtcctccagaatttccttcggcgacaggtggcagtggtagtcgacaatcggcaggccgcgcaccgcctcatacagccgctttgccgtgccgcttttcaaaaataaatcctcccgcatgggaacaaaactccttcctgtgctctgttactgtaagtataacatatgaaattgcaaaataaatggtatatgtcgccggatagattgcaaatcgattcattttgtgctatgctttgtaaaaaggggggctgctcatggaggggcgcagagaggacagggcgcaggtgatgctcgaggcggatttcgaggcgcaccacaaccgcgacccgtattttcggacgatcgaatttcacgcgcacgattttctcgagctgtacctctttctcgacggcagcgtgacgtactacattgaggatcaggtctacgacctatgcccgggcgacctgcttgtcatcccgccggggcggatgcaccggccggtcatcgcgaacgagcatgcggcgtacgagcgcatggtgctgtgggtggagctcgactacatcgcgcggatcgacggcgcggcgggcgagctgcaggcggcgctgcgcggcgtcgggccgaacggctactgcgtcccgtttcggggcgacgacctgattttcgcggtaacgctgttcaagcgcatcgtggagatgcaccgcagcggcgcggacggtgtgtttacggcttcggcgatccgcctctacctgcgcggcgttttcgaggcgtacagtcttgtcgagaagcaggcgcagggggaaacggcggtgatcccgcaggtgatccgctacctcaccgcgcatttccgcgagccgctgcggctcgacgatctggcggcgcgtttcttcatcagcaagtcgtacctgaaccgccactttaaggcgtacacgaacgcgacggtttacgcctatctgatggcgctgcgcatcacccatgcgcgccggatgctgcgcgagggcgcgacggcggccgaggccgggcgcgagtgcgggttctccgactactcgacgttttacaaggcgttcaaggcgcagaccggcatcacgccgcaggaattcaaggcgcgcgtgtaggggcgcgggggagggggcgagaatatgcgggcatactttcttaagacggcgcgtatcggtttttcggcgtggcaggcagaggatcttccgttcgcggtgggattatggtgtgatcctgcggtggcggggatgatctgtgcgcgtgggtgtttcacgcagcaggaggcagcggatcggctgcggctggaaatggagaatctgtgccggtacggcgtgcagtattatccgctgtttctgctggagaacgatgtgtttatcggctgctgcggcctgcggcccggcagtgtgccgcgagaattcgagctgggattccatttgaaaccggcgtactgggggaaggggttaggttttgaggcagcgaaagccgcggttgaatacggattttccaaatgccatgccgatgtaatctgcgctgggcatcatccgaagaatgcggggtctgctaggctgctggcccggctgggattcgtctatacgggagacgcgttttatgcgccgaccgggctgcatcaccccacctaccgcttgtcgccgccgactgcggtcggcccggagaagcaggcgtcggaatcctgaaaacaggtgaaaaagagaagggaggagggcatcccgtttggatgccctcctccccttttggttgaaaggaaacgcttgtaatcggatttatgcgacgccctgattggcgctttcgatcgccgcattcgtgctgttggcagcctcctcgaccgccgctgtcacatcgccgccgttaaagacggattcgagcgccgcgacaaggtcggtgcggagctgcgggagctgggagagcagcgggcccgcggtgatgccgttgaccttcgaattcaagagctgatcggccgaaaccttgagctgcgggtattcctcgtaggctgcgagcatcgattccgtctcgtaggcgccgctgcagatcgggtagtagccggtgccggcggcccatacggcctgcacatcggcggaggtcgcgtacttgaagaattccatcacgcccgcctcggtttcttcgtcgatgccggccgccacgcacagcgcgccgccgcccgcgtagacgccctgcgcatcggtgccctccggcacgggcagcatcgcgatgccgacctcaaagtcgcagctgtcgatgacgttgcgtgcgacggcggaggaggagatgtacatgccgatctgctgctgggtgaagccgctcagcgtgttcgtgccgtcggagccgtagttgagcagcaggttcttgtcctgcagatccttgatccagttgaagatctcaatgatctggtcctgataggcgacctcggtggcgcggccgcttctgccgttttcgttgttgatcgtgtagccgcccatgttcgtgaccatctggtcgagcgcatagccgtaggcgtacatgccgaccggcatcacgctgctgccgctcgccgcaatcttttcggcggcctcggtgatgccctcaaaggtcgtgggaaattccgtatagcctgcgtccttgaagagctgcgcgttgtagtagacgaccggggaggagcagttgaagggcatcacgtagagcgtgccgtccacggtgtagaagttgaccgcctgctcgagcaggtcgctgtcgtcgaagctgtacttctcgatcaggtcggaaaccgactgcaccatgcccgaatcgatcatggactggaggttctgctcgccgatctggatgatgtcggcggagccgtcgccgtttgccatgctgaagaacttgccggtcgattcgtcgtaggtgccctgattttccgcgacgacctcgtacttgtcctgactcgcgttgaagtcggcgacgatgccgtcgagcacctcctgattcgcgccgctcatcgagtgccagagcgagatctgcaccttgccgtccgcactttgcgcggcggagctgccctgtacggcggaggtgctgccggtgctgctgccgtctgtgccgccggcgcagcccgtgagcgcgagcattgcggccgctgcgcaggcgatggcgcgcagcgcggtctttttaacacggtttttcatttttttcatcctttcaaaatcaggtgtgtccgcgggtctcgaaaagagcgcgggcacgctttattttaatgctcccttggtcatgccctcttgcaggcgtttctgaccgaagaagattaaaagcagtgtgggcagcgatgtgatcatcgcgccggcggccatcatgccgtaatcgctgacggcctcggtgttcttgagctggcgcaggccgatctgcacggtgcgcacggtgtcctccgtggtggagagcagcggccagaggtaggaattccagctcacgaggaagaagtagatcgcgagcgtcacgacggtgtttttcaccatcggcgcgacaacgcggatgaagaaggcgaaatccgagacgccgacgaccgtggaagcctccttgagctcaagcgggatctgcatcatgttctgccggaaaaggaagatgccgaaggtggaggcgacgccgggcagaatcaggccgggaaaagtgttgagcaggttccacgagcggatcgtctggaaatttgagatgacgagcacctcgcccgggatcatcatcgtcgccatcatgatgaggaagatgatcttcttgccgcggaatgggatgaacacgaccgcgtaggcggcgagcagcgcaaaggtgatctgcagcgtcgtcgagagcacgccggtgacggcggagttgatcatgtaccgcagcagcggctgcgtgttgaaggcgttgatgtagtttgtaaaatcgagctttgaggggatgtagttgccctgtaaaatatcgttgaggtcggaaaagctcaggcagattgaaaagaggatcgggaaacatacgagcacggcggcggccgtcaggatgatgtaggtgacggcggtctgcgtctttctcactggtaggtcaccagcctttcggtgagcttcgtctgcagctgcgagacgagcagaatcaaaaggaagagcacgacgccctgcgccgaggccgagccgatgcggaagttgacgaacgcgtccttgtagagacggtagacgagcaggttcgtgctgttgttcgggccgccggccgtgagcatgtcgatcaggccgaaggactgaaacgcgccgatcagcgccgtcgtaaagacgaagaacagcgagggggagatgagcggaatcgtcaccttgaagaggcggtagaaaaagccgccgccgacgatctcgacgctctcataatgcgagtcgtcgatgttcttgagcccgcccatcaaaacgaggtacgaaaagccgatgttcatccagatcgacaccgctgaaacggagagcagcgcgcagtttgcgtcggtcagccagccgaccggccggccgccgagcgaggagatgaggtggtttaaaaggcccgccgtggggtggaacaggaggttccagaacacggagcctgccgcgaccgaaatgcccatcgtggaggaaaagatcgtgcggaaaacgcccatgcccggcagattgctgcacgagagcacggcgagcatcagcgagatgatcaccgtgagcggcacggtcagaacgagatagagcagcgtgttgccgaggttttgcaggtatttcggatcggtgaagagcgagatatagttttgaatatcgacgaactgcgtcagcgcgccggtgttcgtcgtggcaaaaaagctcgtgacgagcgttttcacaaacgggtagaacgtgaagatcagaaagatcagcatagaggggagcaggtagatgatccagagcgggaggcgcttcgtttttgagaccggcgcctccgccgtatcctgcacggcgtcgtgtatatattccatggcgttttcctcctcaggccgactgccggtcgctgcccttgatcgtcagggcggagcggagcagtacgccggtttcttcgtcgaagaaatggaaggtgtcgggcgaaagcagcacgcggatggcgcggccgccctcgagcaggtactgccccggccagcgcgcggtgaaggtgtgcgcaccgacggagaagagcacctgcgtttcgttgcccatcatttccgtgctgcaaagcgtcgcggtgcaggccgcggcgctgcccggcgcggcaagctcaatttgctcggggcgcacgccgattttccagcggctgccctcgggcaggctgcggcgctcgctttcggtaagcggcacggcgagcgagtggttcagcacgagcgtgctgccgctcagctcggcctcggcgatgttcatctgcggcgagccgatgaagcccgcgacgaacgtgttggccggcgcgttgtacagctcgagcggcgtgccggtctgctgcaccttgccgtcgtgcagcaccatgatgcggtcgcccatcgtcatcgcctcaacctgatcgtgcgtgacgtagatgacggtcagcccgagctggcgctggatgcggcggatctcggtgcgcatgtggccgcgcagcttggcgtcgaggtttgagagcggctcgtccatcaggcagatgggggagtggctgcaaacgctgcgggcgagcgcgacgcgctggcgctggccgccggagagctcgcggggcttgcggctgaggtattcggtgaggccgagcatttcagcggcttccgcgaggcgctccttctgctctgccttcggcaccttgcgcacgtcgaggccgaagaggatattgtcgcgcaccgtcatgtgcgggtagagcgcgtagttctgaaataccatcgagaggttgcggtccttcggcggcatctcgttcgcgattttgccgtcgagcatcagcgtgccggaggagattttctcaaggccggcgatgatgcgcagcagcgtgctcttgccgcagccggacgggccgacgaggatgaagaattcgccctcgcgcacgtcgaggctgatgccctcgagaatgttctttttgccgtcgtacgtcttgacgacgtcgcggatctctattttattcatattcggttcctttcttccctgcccggtgcgcggccttgacgccggcccgggcgctgtgccgtgcctgcggcttattttgccttggctctcgccccgaaaaagtgcatgacgttgaggtcggcctcgaggtcgctgccgtgcgtgccgtagccgtcctcgttcgtgtggatgccgtggtcggtcgcccagcagaccatgcggtcgaagctctgccagctttcctcggcggcggtgcagaggcggtcgaaggcggcgatgtggtgcttcagtgccgcgagcgagcgctcggactccggaaacgtgcggtgcatcacgtcgtcgtactcctgattgtagacgacaatcacgtcgtaatcgctttcgcggatgagcgcttcggctttgtcggtcacctcgccgtcgtaggggaggatgaagtaatcgacattgcgcccgccgaagatgatcgccatgctcgagttctccacggcgaccaccgcggttttcagatcggactgcgcgaggcagtcgaacagggattcctgcgcgagcacgtgcttctcgtatttctggatgccgtgctttatgggctcgacgccggtgtacatcgtgccgaagcagaccggcgtgactgagggcagtaccgtgcagaccggcacggcgagctgtgtgtgccgcagcacgggggcgaaccattcggtgtacttctgccaaagccacatgcccacggcgtccgggttatagatcagcagcttttcggcacgctgcatgccggccgcctgcaagagcgttttcgcaaaggaaaacggctctgcggcctccttcggcgccgggatgccgatgcacccggcgaccgatgcggcaaactgtgtcatggaaacagtgtttttcatttggattccctttcttctccggcccttttccgccctatggcgcgggccgcctcaaatcttttcttcgtttgcttagtctattctaaaacactttgccgggctgtgcatcaaggctgtgtaaagctttgtttcaaattgcgtcaaaaaagccgagaaccccggacgcgcagccgcaggggctgtgttccggggttctcggtgtgtttatttcagattcgtcgtaagctggtttaggcctccatctccgcgccgttgtagtcgatgtaccacttctcgcgggagacgggcgtttcaccggtcatcaggcggcagaagccttctgccgccacctccggctcgatctgcgccgtggtgcggcccatatcggtgttcatgcggccggggtgcacggcgtagaaatcgacgtcgggaaccgacgcgttgagaatgccgcaggcctttgtggcggcggccttcgagagcgcgtagcacggcacccatgtgccgcagctgcggacgccgacgccctcggaggtgacggtgaagatccggccgcctttctttatataggggtaaaagcatttggcggcgatcacggggccgacggcgttcacgtcgagggtgcggcgcagctcgccgacgtcgcattcgtgcagcagcttcacgcggtcgccgtcgagcagtacgcccgcgacggtgcagagcgcgtcgatttcaccgaggaatgcggcggcctgcccggccgcctcggccatctgcgcctcgtcggtcacatcggcgctcagaacgcggagcgcctccgggtaagaggcggcaagcgcctcgagcgccgcggaaaacgaggaggcgccggccgcgacgcggtggcctgcctttaaaagccggcttgtcaggcagaggccgaggccccgagacgcgccgatcacaacaaaattcatggggattccgtcctttccgggaaagcgccggccgctgcgccgaatcgcatgggctttaaaatgcctgcgcggcggaagcggcggcgcgggtggaggcggcgcgctgcgggcagccgctctgcaccgtccatatgcggcgtcagtagctctcgagcgtctccatgaggcacttgagatccttcgtgaaatcgaggtaggcgtattcgccgttgccgccgccgtacttgccgcgctgcacgcagaccgcgccgaatttctcggcggccttgatcttctcatcggtattcttcacggggaacgcaatgtggtggatgccctcgccgtgctcgtcgaggaaatcctgccacgtgctcttcacgccgttgggctggatcagctcgagctggatgttttcgaggtcgaaaaacgccatgaagcagttcgcgtccggcgcgggctcgccgttcaccgtcgtgccggtgacctcatatttgccgccgtcgcacgtggggggaaccggaacgccgaagaactctgcgaatttgattttcgtcgcctctacgtcgcgcacgatgaagcccacctgcgccaatctgtttgccaaaactggatttgccattttttatgccttctctccaaaaagatttatattcagcggctgtccgctaaattaacacgtgtttagaataatatcggaaaaacgggccgctgcgcagcccggcagatccgcggctcttgcacctttcagcgctcgatgcggcggcaggagccgccctcgataaaccggctttggatgaacacgctctggggcacgttctcctttttctcgatcgtgtcgatcacgcggtcgacaagcgaggtgaacatctccttgaaatcgaaggacacggtcgtcagcgtcggcgagatgcgccggccgcgttcgtggccgtccgcgccgacgacggagatgtcgtccggaattttcaggccgagctccgcgcacgcatcgtaaacgccgaaggccacgccgtcgttgttcgcgcacacggcggtcggcaggtcgtccatacaggcggaaagcatgcgctttgcggcctcgtagccggtttccttgacgatgccgccgtaggtcatccacttgttctgcatcggcaggctgtgcttgatcatgccgcggatgtagctttcgtggcggtggatgcagctcaggcggctcagatcgccgtcgatgatcgcgatcttgcggtggccgagattatacaggtaatcgatcgtctcctcgccggagttgcggtcgaaattgacgcagatccggttcgggatgtcctcgttttcgtggtagtagtcgaacaggccgacgattttttccagcccgacgagctcgtctacgagcggctcggtgttgctcgtgccgatgaaaataccggcgtcgatgcggccctccatgaagatcttgcgcacgtaattgatattgtgcttttccgtgatgttgtcgagcacacaggcgagcacgaggtagccgcgccgcgcggcagcgtcgacaatgtgcatgaagtagctgctcgtgagcgaatcgcgcgcgatgcccgcacggcccatccagaacaggccgagcgtctttgtgcccttgccggtgagaagctgcccggaaagcagcgggtagtagtggtgctccttgatgaccttcatgaccttctcccgcgtttcctccggcacgttcgagtaaccgttgaccacgcggctgacggtgctgcgggagacgcccgcgagccttgcgatgtcgttgctgttgattcgtttcaaattgctgatcctttctgtaaacgctgtagcttttgaaagcgccctcagcttgtattttaaggcggcgggtcgaaaaagtaaagcgcggaacgcgaagtctgtcgaaaggacgggggaaaagagattttgcagcgaaaattataaacacaagtttactacgataaatactagcatttcacggtcgattatgtcaataggggtgcgatcgatttttttgaaaacggccatgtttgggtgttttgtatatgtggaatcgcttccatatgtatataatagcagaagtgcaaaaatacacttgaaaacacgtgtttattatgttatgatactattaacaaaaacgggggccgaaccggagctcccaaaaaagggggagagaatatggcagaaaaaatcgacaaatccagcgtgtggtaccgtgatgacgatgaatcgatccttgaggtttacgatgtggagaccggggagcgcacgattctgaaagaattcgactacttgatcgaggcgcccaactggtcgccggacggcagattcctgacgtataacagcgacggccggatctttaagttcgatctggagacgaaggagagctgcgaggtatttacggattttgtcacgaactgcaacaacgatcacgtcctgtcgcccgagggcagccgcatcgcggtgagccacggtacgaaggaggacgggaaatcgagaatctacacggtgccgctgacgggcggcgtgccgcggctgatcacgccgctcgcgccgagctacctgcacggctggtcgccggacggcgaaacgctcgcgtattgtgccgagcgcaacggggagtttgatatttacacgattccggtaaacggcggcgaggagaagcgcctcacggacgcgcccggcctaaacgacggcccggaatacgacagcgcgggcgagtacatctggttcaactccgtgcgcagcggcctgatgcaggcgtggcgcatgaaggcggacggctccgagcagacgcagatgacgttcgacgaaaactggaacacttggttcccgcacatttcgccggaccgcacgaaggtcgtgatgctcgcgtaccgcaagggcgacgtggcaccgggcgagcatgtgccgcacaagcacgtggagctgcgcctgatggactccgcgggcggcccggtgaaaaccgtagccgagcttttcggcgggcagggcacgatcaacgtcaattcctggtcgccggacagcaaaaaattcgcgttcgtcagctaccgcatccgcgggcaggaagtctgacggcgcggacaagctgcaaaagggcagatgcagccggtcggctgtgcgcaatacagtattaaagaaagagtggaggaaaagtaatgaaaaagcagaagatcacccgcattctcgcggtgctgcttgcgctttcgatgctcgtcggcctcacggcctgcgcgggcggtgaaacctctgagccgtctgcgggcggcgaagcctcggcgagtgaggtgagcgttgccgaaaatgacggccccctcaccccgtatgaggagccgatcacgatcacgtgggcggtacaggcctcgcccgttcagcagtttatcgacggcgatacctacgacgacaacgtctggtcgcgcctcatcaaggaaaagctgaacatcgacctcgaggtcgcgttctccgcggataccaccacggacgcgtacaagcagaagatgaacgtgatgctcgcctccggcgagttcccggacgtcgtgcgctggagcgacagaaccttcttcaagcaggcgcaggaggccggcttcattcagccgatcggcccgtcgttcgacgcatacgcgaccgacgcggtcaaggcgtatgaaacaaattacgcggaagcctttgagggcgcgacgatcgacggtgtgctctacgctttcccgtatatgaacgataacttccatcaggcgtacaacctctggatccgcgacgactggctggagaacaccggcacagagccgccgaaaaccgttgaggaaatgatcgagctcgcgcggatcttcacggaggaagacccggacggcaacggcgtggacgatacatacggtttcgcgctttccggcacagtcacgcagaacaactacgcgacactgacgggacttgcgaacgcattcggcgttccgggcttcgattccaccggcacgttcttccgcaaggatgacggcgaactcacctttgcgtggatccagcccgaaatgaaggaggttctttcgatcctccgcgacatgtacgagaagggctacatcaatccggaattcacggcggacgacgtttcgacgatggaggaggatgtgacgaacggcacgatcggcatggcgtacggcccgtgctggggcacgtggcacccgtacaactactcctatcaggcggacggcgtgatcacgcgcccgtacccgattcccgaggcggagggctacaccccgaagatcggcattgaatccgcaaagaccggcgacctgtttatgatcggcgcgggctgcgagcacccggaggcgatcgtgaagatcctgaacctctacgagcaggttgcgatcagctccgacgacccgaacgacttccagacctactgggcaaacgaacagtaccgcttctgcccggcttacatcggcattccgaccgagctctttgcgccggtcatccacgaggcgctcgaggcgggtacctcggagggcctttccggcacggcgctcgaatactacaactacgttgtgggctttgaggacggctctctcgcagacgacaccaacgcctacggcacgtggggacagatgaacctgaccgatcagggcggctcgatgaagatcgacctcgattataaggcgaacggctggaccgtcacgaacgtgatggagaacgagcgcccggagatttggttgcagaactcctccgtgctcggcgatatggtcaacaccacgtttgtcgacatcatcgtcggcaaccagccggtcgagtatttcgacacgtttgtcgagaactggctcaacgcgggcggacaggaaacgctggacgcgctcgatgagatgtacccggcggaataagccgcagacaatcgattaaagacacagagccccggggcggggaaggcatttgcgtttgcctgccccgggcatttctttaaaaaagtggtggggagtatggaaaacaagaaaaaagccccgggaaggttccgcagggagcttcctctcgttttgatgctgctgccggccgtcattctcgttgcggtttacagctacggctctatggtgggcacggtcatcgcgttccagaaattcaacccgacaaagggctttttcggctcgccgtgggttggcttcgataatttcagaaacctgttcacgatgccgaccatcgggcaggttatctacaacacagtctttatttccctgtgtaaaatgatcggcggcatcatcgtgcctgtgattttcgctttgcttctgaacgaagtggcgcggatttccgtgaagcgcacgtatcagacgcttgtctatctgccgcactttctttcttgggtcattctcgccggtatctttaaggatattttctcgcagaccggcgtgatcaatacggcgctttcggcgctcggcatggagcctgtcggctttttgagcaaccagcagcttttcccggtcacgatgatcgtgaccgacatttggaagggcttcggcttcggctcggtcatctacctcgcggcgctgaccggcatcgaccagaacctctatgaggccgcgcagatcgacggcgcgggccgcattcagcagacgatccacatcacgctgccgggcattttgagcacgatcgttctgatgacggtgctcagcatggcgaatatcctgaacggcggcttcgaccagatctacaacatgtacacgccggcggtctatgcgacaggcgacatcctcgacaccttcgtgttccgcctcggcatcgacaacgcgcagttcgcgctgtccaccgccgcagggctctttaaatccggcgtatcgttcgtctttatcgtggcgtcctactggctggcagaccgctttgccggctaccggatcttctgacgggcgcgggaaaggtggtcaatcgtatggcaaaaacgaaaacttccccctcgagaaagctttttctcgtgatcaactacatcgtcctgacgatcgtctcgctgatgtgcatcctgccgttcatcaacctgctcgcgatctcgttttcggataagaccgcggttgcggcgaacgcggtttcgttctggccggtcgggttcaacacggcggcctatgaattcatcctcggcaacgatcagttcctgcgcgcgctctggatctccgtgcagcgcacggtgctcggcgtgctcgtcaacatcatcttaattattctcacggcgtacccgctctcgaagagcacgcaggatttccgcctgcgcaacgtgttttcgtggttcttcgtcgtcacgatcctgttttccggcggcctgattccgacctacatggtcgtcaagtataccgggcttatggatacgatctgggcgctcgtgctgccgggcgcggtgcaggtgttcaacatgcttgtcgtcatgaactacatgcgcagcctgccgaaggagctggaggaggccgcgtacatcgacggcgccggccatttccagacgctctttaacgtcattctgcccgtgtgcacgccgacgctcgcgacggtcacgctgttctccttcgtcggccactggaacagctggtacgacggtatgatctacatgaacaccgtcgataaatatccgctgcaaacctatttgcagacgatcgttatcaatccggaggcgtttttccgcaacgcgacgaacatcagcgcggagctcggcaatttcctgaaccttgtcagcgcgcgcacgacgaacgccgcgcagctcttccttgcgacgatcccgatcctctgcgtctatccgttcctgcaaaaatacttcacgacgggcctcgtcatgggcagcgtcaagggttgatccccgtttgattcaattctgaaaggagctccgtttattatgaatacaccggtcgaaaagaaaggctttatccagatcaacatcgtcgtttcggatatcgaaagggcggcggagaaatgggcggacctgctcggcatcgaaaagccgcagatccgcgtcaaccatctggaggggggcgaaaactacaagtaccgcggcaggccggtctcctgcgacctcaaggtctgcaacatcgaaatggagaatttcgtcatcgagctgcacgagcctgcgggcggggaaagctcgtttcaggaatttctcgacaagcacggcaatggcgtgcaccacatcggctttgaggtcggcgacaagcgcgacacggtgatcgcggagctcgcggccgcgggctatgatacggaccgcacggtcggcatctacccgggcagcagctggacgatcgtcgacggcgaggacgacctcggcgtcaacctgaacatcaagccggtgaggtgagaggcgtgcctgcaaaaacaatgaaaaagatcggcgtggcgatcgcgggctgcgggcagatcacccgcacgcgccacgcgccggaatacagcgcgaacccgaacgccgagatcatcggcttttacgacagggaccgcgcgcgtgccgaggagctcgccgagcagtacggcggcacggtatacggcagctttgaggaaatgctcggcgacaagcgcgtggaggcggtgagcatctgcacgccgaacttcctgcacagcgcacatgcgatcgaagcgctcgaggcgggcaaggacgtgctctgcgaaaagccgatggcggccgccgtggaggaggcgcagcgcatgatcgacgtacagcgccgcaccgggcacatcctgatgctcgggcacaaccagcggctcgtgcgcacgcacatccgcgcgaaggagctgctggaggccggcgcgatcggggagatcctctccgtgcagacgaatttcaagcacagcggcccggaatcttggagcgtggagcgcggcggcacgtggttcttctcgaagaacaaggcggccttcggcgtgctcggcgacctcggttcgcacaaattcgacctcgtgcgctacctgctcggcgacgagattcagagcattttcgcgacgcttcagacgctcgacaagcgcgacgcggacgggaatctgatcgatctcgacgacaacgcgatctgcgtctttaagatgcgcggcggcattccgggcacgatgattgtgagctggacgaactacggcgtggaggacagcagcaccgtgatctacggcacaaagggcacgatgaagatctttgcgagcgagctcgacgacatcgtcgtcgatttgagcgacggcacgagcgcgcggcatcatgtcagccggatgagcacgaacgacaaccagctttcctccggcatcatcgacgcgttcatcgaaacgattctcacgggcggcgagccgccggtgaccggtctggacgggcgcaacacgctggcctgcttggaggcggcgaagaaagcctccgcggcgggcacttgggttgaggtcgatctgggctgaatccagccggcgcatatccgcgtggtatgcgccggctgccttttcacaaggctgtgctatactgtttatagatgcccgcgcgcggaacggccgccggcggaagcgtcggaaaagcggcgctgtgccgcactttcgggtgccgtgcggcggggaaattttaaggagttgtataactatgcgtttcggaggctttatcttcaagaaatggaatacgccggaggagtgggcgcaggccgcgctcgaggccgggtattcggcggtttacttcccggtcgatcacacggccgaccagaaggtgatcgacggttacaaaaacgcggccgaggccgccgacctcgtgatctgcgagatcggcgtgtggaacaacgtgctcgagcgcaacgcggcaaagcgcgaggcggcgatcagccgggcgatccaccagctcgaacttgcagattacgtcggcgcgaactgctgcgtcaacatcgcgggctcgtacagcgaccagtgggacggcccgcacaaggacaacctgaccgagaaagcgttcgacgagattgttttgacgacgcagcggatcatcgatgcggtcaacccgcggcgcacggcgtattcgctcgagccgatgccgtggatgtaccccgacaccgccgactcttacctgcggctgatcgaggcaatcggccgcaagggctttgcggcgcatctcgacccggtcaacgtgatttgcagcccgcagctctactatcgaaacggcgaggtcattcaggaatggttcgacaagctcggcacgcagatccgcagctgccacgcgaaggacatcacgctcggcggcaagctgaccgtgcacctcgacgagtgccgccccggtctcggcgcgcttgactacgagacgtatctgaagtgcatgacgaagctcgacgaccgcgcgtgcatgatgctcgagcacatgaccgaggagatcgactacatcgaggcgacaaagtacatcaaggggctcgcgaaaaagctggatattgcgctgtaaggcggcaaattgtatagaagcaagacgaaaagggacatccccgccggtttggggatgtccctctgttttgtccgaaagcggcggaaaggccggaagctgctgcgcgccgctacacgaacagcgcaaacagcgcggctgcccagcgcagccagaacggcgcggtatcggcgagcaggcggaacacctgccttctttcctgcggcgaaagtgcgccgagcttgcgaaagatctcgccgccgagcgattcctcggtgccgatggcgatcggcccggaagcactgctgccgagggctgcgaaaccgccggctgctgcggtgccgactgcataaaagccgcaggccgcgccgccggcggcaaacaggccgagcgcaaccgcgccgaatgcgagaatcccgatcgccacgcagccgatagcgagcagaccgatggcgtccaaaccgaacgcaagcaggccgacggagatgaggcctacggaaacaaagccgatcgagatcaggccggccgagacgacgccgcgcgcgatcagccccacggcgaaaaagccctttgccacgcggccggggccgatgttcacgtggtagagcggcataccaaaaagctgccgggcgcttttccgctcatagcaggggtacggcacgctgacggtgaagtgcacgccgtgcggggacggttccgccgcttgcggtgcggccggcccgcgcggcgcatcgcgcagcaggtaatcgagcgagcagtcgaacagcgcgctcaggcggatcagcttctccgtttccggataggccgcgccggattcccacttgctcacggactgccgcgaaacgccgagcagctccgcaagctgctcctgcgtgtaattctgttcccggcgcagcgccgagagcttgtcaccgaatgtcattttcagtccttctttcataaatcctgattttcatagaacgccggtttttgcaccggagtggcaggccggagcttattgctctgcaccgtactccggtgccaagccgcgcgtgctttcggatgttcgcggcatatccgccccccaaaaaatagccgcgctcgtgcaccatttctcccaccgatgcggcggctggaaaatcagcggccgcgctcattgtaaatagaagtgcgtggttcagcgctctgcgcccgccgcggccgggatatacgcgccgccctcgtattcaaggaggatcaccgatctcgcccgccgcgctttcccaatggcgtggcgccatgccgacagcagacagaatccctgaatcggcggcgcgcacatattccgcccctgttcggctatttcagtatagcatagaacgctaaaaacaccagaattttgcgcgttcaaaatgtaaacttgcggttgcgcaggtgtttttggcaaaatcgtgctttttgaaacttaaagttgacaaacgatatactgtgtggtacgatgtatataatgaagcgatagaaaggagtgtgcggcaatgaaactcgaggaatggcggtcgcagatcaagcgcggcacgctggaatactgcattttgctgctcgtgcagcagaaatcgcggtacggctacgagatcatgagcgagcttgaaaagcggccggtcatcgcggcgaaggagagtacgatctacccgcttttgcgccgcctgctcaaggaggagtatctcatggccttctggcaggatgcgcaggagggactgccgccgcgcaagtattacacgctgacggagtacggcgccgcctatctggaggcggtgacccgggaatgggaaaatctggtggaaacggtcgcggccctgcggcaggggccgtgcatcgaagaaagggagagcgcacaatgaaaagggaaaacagtgtacaggattatttgagccggatcgaccgcctgctgcggccgctgccggtcacggagcggatggacatcatgcaggagatccgcagcacgatcgccgagatgcaggcggacggtacggctgaggcggaaatctgcgcgcggctcggcgacccgcatgcgctcgcgcgggaatacctcggcacctgcgcgaggaaccgctcgctgccgcgcttcacgcggtttctcgcggctgcgggcttttacagcgtcgttggctttacgggcatggtcgtgctgcccacgctttcggtgctcgccgccggcatgctgatcagcgcggtgctcgcgccggttgcgggcatcatcgatttcggcggctttctattcggctttgacgtgccgttcgtcatgatacggttcggggattggtcggcgcccgcgtggctcacgttccccgtttcactggtgctcggcgcgctgtttttcgcggcggcctacggcctgtggcgcgcgctgcgctggtatgtgcgcacggtgtgccgcggaaaatccgcgctgcgggcgatgtaagcgggataatcgggggctttcaggcataagaataggcggcgggacaaattcccgccgcccttttgctttataagttcgattcgatctgcgcgcggatgtccgccgcgaggtccggcacggtaccggcatcatagccggcgaattcagccgccgtcatcacgtgcgcgcccatgcgggccatgtcctcgaggtttacgcgctgaatctcctccgtctgcgaggaggtgcagtccgagagtacgacgacgttgtaatcgagcgcgttcgcgtcgtagcacgtcgtgcggatgcagttcggcgtggtggtgccggcgaggatcaccgtgcgcacgccgaggcggcgcaggatgaggtcgagctccgtttggaaaaaggcgctccagcgcggcttgatgatcgtgtagtcgccgggcgcggggcgcaggctctcgggctcctcggcgccgaaggagccgggcgacatgctgcgcccgccgccgagccacgtgtcgtggcgcgtgcattcgacgtcgctgccgtccgcgcggtagatgcgcttgacgaaaaagatcgggatgccctttttccgggcggtctcgatcgcggcggcgcaggccggcaccgtggcggcggcgcccgcgatgcagtgcgcggaatccggcgtgataaagccgttttccatatcgatcagaataaatgcggatttggtgttatttcgcatggtgctgtttccccccattttttatgcagctttcagtatatcagattgccggcggctccgcaagccgcaaaaagcagcggtttgtataggttttcgatattttttgcggcaggtgctttacaatctgcggcatgtggtatataatttttagaagaaatcattgtgatgtgcggcggctctgcaaggtatgggtcccgcgatgaaaggatggttagaattatggctttttgtcagaaatgcggcagtcagcttgcagaaggcggcaccttctgcgcggtatgcggtacacccgtagcgcaggctgcggcgccggttcagcagcccgcacagccggagcaggcccccgaggtcgcgcccgcgcagcagcccgcggcgcagcaggcgcccgtgcagcagccggtttaccagcagcccgtctatcagcagccgatgcagcccgcgtataatcctgcggaccacacggcggaatttgcggcggacgacatctcgaagaacaaggtcacggcaatggcggcctacatgctcggcatcatcggcattgtgatcgcgctgctcgccgcgccggaatccccgtatgcgagcttccattcccgtcaggcgctgaagctggagatcgtgaaccagctcattctgctggcgatgatcgttttgatctggacctttatcgtcccgatcgtcggcgcgatcgccatgctcgcgattatggttatccgcgtgatcctgtttttccaggtatgcgccggcaaggcgaaggacgccccgctgattggctcgctcccgttcctgaaataaaatacagtccatgttcaaaggctctccgcttgcattggcggagagcctttttgcgtccgcccgcgcgggcggaatgcagaggggaggaaatcatcggaaggccgcgctgaaattccggtaatcgttcggcgacatgtttaccgtggccttgaaaacgcgcgtgaagtagcgcacgttggtgtagccggtgcgctcggcgacctccatcaccttgaggttcgtctccttcaaaaggtttttggcctcctgcatgcgcttgtcggtcagaagctgggtgaagctctttccggtgtgctcgcgcacgagacggctgatgtaggagggattgcggccgacggcgcgcgaggcctcggcaagcccaactggacggctgtagttcgcgttgatatagcagcggaccgcactgacgagcgcgttggtgcggttttgctgcgcgtttgcgatgagcacgcaggccgattcaatccaagcgcgcagggcggagagactctctggcgcctgctcctcaagcgccgcgaggatcgtgccggtgcgctgcggcaggccggcggcgtcggcccggtgctcccgcacggtgaagcagacgctcgagacgatgagcaggcaggtggaatacaggtcgtccgggtggtcggcctgcacggtctgcaaaagccggtcgaagcgctcgagcgcgagggcgctgttcccggcgccgatttcgccggcgagcgtctccacgccggcctcaatctcccagcgggccgtgtcttcgtccagaatatcctcgtacagaaggaattccggctcgtcgtttttgcggatatattcgaggcattcggaggtctggtggcgcagggtctgcatgtttgtgagcgtgtcggaaacgcggctgatgccggcggagagcacgccgagaaagctgcggtgcacgtaggcgtgcaggtcgcgcagaaagccgagcaaagcctcgttgtcgtcgtaggggtccgcctcccgaacttcccacagcataaagacgaggttgccgaacacgtaggtcacggttttcggcagcgcctgctggatgtagttctccacgaggtgcgtgcagtagtattcgctttccagccgggcgctgtccatggcggtgctgcaatggatggcggcgaggcggtagcgcgtgaactccagcccgtagatgtcgcggctgcggtcggcgtccggcgcgctgctgctgaacagcagcttttcgacgtactgccgccggatgctcaggagattgttcgcgaaatgctccttgaacacgtggaagagccggtcgtgcttttcgtcggtctcgatcttcttctgcgcgcggagcacgacggagatcaggttttccgattcgatcggcttgagcaggtattcaaagacgttgttgcggatcgccgcgcgtgcgtactcgaaatcggagtagccggtgacgagaatcacgaggatcttcgggtaatttgcgtggatgtgcgcggcgagctccagccccgatttgctcggcatgcggatgtccgtgatgacgatttcgggctgctcgcattcgatgatgccgatcgcgtcgaaggcgttttcggcggtgagataggtgtgaatcaaaaggccggaggtctttaaaaccgagaggatgcgctcgcgcaggagcgcctcgtcatccacgatcagcagcttcatgccccgtgctcctttcttcggcgtccggtgcgggcagctccggcgcggttcttttcggcaggcggaccgtgacgcacgagccgccgcccggaagattttcgatctcgagcccgtacggtgcaccgtacatgagctggatgcgtttttgaatgttgagcaggccgaggctctcctgcatgagcgtgccggtgagcgaggaatccccggcgcactggtgaatgcgctcgatcactgccgcgggaaatccgcgcccgttgtccttgacggaaaagacgagcgcgtccggctcctcgcgcccggaaaggccgatcatccccctgccgaggatctcggagatgccgtggatcacggagttttcgaggatcggctgcaaaatcagcttcgggatgtagtagtccatcatgctgtccggaatttcgtttaggaaaatcagcttgtccgtatagcgcagccgttcaatgaacatgtactgctcgacgtagcggatgttctcccgcacggtgaggatctcccgccccttgatgctcatgcgcatgatgtcggcgagcgccgtcacggtgcgcttgatgtcgccggggcggttcagctcgacgaggctgttgatgcagtcaagcgtgttgtagagaaagtgcgggttgatctgcgcctgaaaggccttgagttcggcgcgccgcagcagaagctccttgttgtacaccgtttcgatcaggcggttgatgcgcaggatcatgtcgttgtaaacctgcgcgagctccagaaattcatcccggctgtcaacggtgatcagtgcctgccggtcgggtgcggtcgtgcggcgcagcgtctcaatgaagtgctggaactgccgggagatgatgcgtgaaatgatgatgatcgcgaagaaaacgagcaggagcgagacgaggatcagcgagagctgggcgaagaagatgccgttcatattgcggtaaagctcggtttcgttgatgatcgtgtagagcgtccagtcgttgtgctccgactgcgtgcggttgatcttgtactgcgcgccgtttaagggcaggctgccggtgctttcgctgagggcgtccagcttttcctttggcacgggcgaggaattgtacacggcgctgcccgcgccgttcgtaatcgcgagcagcacgtccgccgtgccgaggtcgctcgtctgcacgctcgtcatgctgccgagaaagccgaggttgaaatcgatcatcatcatgccgatctcggtgtcgtagatcgggtccttgatcagccgggagatcgtgacgacgccctgatcgagcttatcgtagctgtagaggatgccgccgtcgagcgcgcgggtctcctcggcgagcgggcgcatgcggtctgtgaaatccgaatagatcaggcggctgtccatccgccacacgtactggtcgccgtagctgttcgtgagcgtgatgctctccacgtatacgtcgtagctgatgatcatgctgtgcatggactgctggatcgattcgttcagcgtctcctgctgcgcggcggaaagcgtgcggcggttcgtgcgaagctgcttttgaaagtttgtgtcgaacatgaacacctcggattcggtgcgcagctgcgcaaggtagctgtcgacaagctggatcttctggtttgccacgatgctggcctgatggtctacgatgtttttcgtctcctgaaacgagatcaggtagactgcgcctatggagatcaggtaggtggtgagaatcaccgggatcagcgtgaaggtgagcttttccttgatgcgcagggcgttcagaaagcggctgatttttccgtcaggcttcataaaatagatttcctccttcctgaggatgggagaaattcccgtcggttttgcacgtatttcccaactttacactcaaaagattagccgaattttgccggaatgtcaatgcggcggcgccccggttcgggcgggaagtcaaaaatagggcacccagaagcaaaaattgtgaaattgtggaaatacacaaagcaaaatataattaagacaataaatctaggaaatgtgcatggggcgcttttccggagaaaagaaaggaagcgtaaggatatgaaggccagaaaaattctgtcgctggttatggcggccgcgctgtccctcggggcgctcgcgggctgcggctctggagacacgggcacatcgccggagggcggcggcagctccgccgcgcagacgggcgacggtgcgaaatccgacgcaaagctcgagatctgggtgtacggctgggagaaggcgagcgccgacaagattcaggaggacaccgccgcctataaggaggcgaccggcgtggaggtcaccgtggtgccgatcgccagcgattcctacagcacgaagatccaagcgacgctcgcgggcggcaacaacccggacctcgcctttgtcgatgcgggcgtgcagagcacgcagctcgcggcgaagggcaagctgctcggcctcaatgattacggcgtcggggagtacgaagacaagttctacgaatccgtgtgggacacgatggtctataaggatgaggtttacggcctgcgcattacctcgaacaatctcgcgctgttctacaacaaggagcttttcgagaaggccggccttgaggagccgaacggcgactggacgtgggacgacctgcgcagcgcggccaaggcgctgacggacgcggacaacaacatctacggcctcgacctgccggtttacgacaaaaacggcggctacacgtggaactggctcccgttcctgtggcagaatggcggtgaattcttgaacgaggagcgtaccgaggcggtctttaattcccccgagggcctcgaggcgctcgaattctggaaggcgatggtgcaggaggacaagagcgtcccgctgcaggccgcgccaaccggcgtcaaccgcttcacctctggcatcacggcgatgacgatcgacggcccgtggaacctgagcaccttcctcagtgacccgaacttcaaggataaattcggcgtggcgccgctgccgcagaaggagcagcaggcgacggtcgtcggcggcgagggcgtcgtggtattcagcaacacgaagtacccgcaggaggcgtacgactacctcgtgcacctgacctgctcggaattcgtgcagaccttctgggagaactggatcacgattccgccgcagccggaattcaaggatttctacgcggacgacgagacctacggcgaatacattcaggtgttctccgaccagatggaatactcgaagacccgtccgttcaccccgtcctggccgcagatcgagaacacgctcggcatcgacttacaggcgtacatgttcgacaaggaggacgacgcgcaggcggcgctcgataaggccgccgcagacgtcaacaagatccttgccgaagaagcggaataaggcattgcgttttgggcagcggcaatccattcgggcgccgctgcccgtatttcgtacagacaaagggaggttatttccgtggcaaagaccaaatcgggcaagatacagcgccggaagaatttctgggggtatcttttcattgcgccgaatttcatcggcttcatcgctttcatgctggtgccgatcctgatgtccctgtatttcagctttacggattacgacgtcatcacctcggcgaattttgtcggccttgacaattacatcagcttgtttcaggacgaccagttcatcacggcgctgctcaacacgctctggtactgcgtgctgaccgtgccggcgggcgtcgtgctcgcgcttctgctcgcggtgctcttcaaccggcaggtgccgggcatcggcgtgttccgcacgctgaccttcatcccggtcatcacctcaatggtggcggtctcgctcgtgtggagcatgctgtacgaggacaacggcggccttttgaacacgctgctcggctacttgaacctgccgccggtgcactggctcaccgatacgaacatggcgatgatctccgtcgcggtcatgagcgtgtggaagggcctcggctacaacatgacgatcttcctcgcgggcctgcagggcgttccgcacgacctctacgaggccgcgacgatcgacggcgcaaattccgtgcagaagttctttaagatcacggtgccgatgatcgggccgacgacgtatttcgtcacgctgatgtcgctgatcagctctttgcaggtgttcgatcaggtttatattatgacgaacggcggccccgtcaacgcaaccaagaccgtcgccatgtacctgtaccagtacggcttccagttctacaagatgggctacgcctgcgcggcggcctatgtgttgttccttttggtgttcatcgtttcactgatccagaaccgcagctcgaagagctgggcagaatccacgatctaggaggcgcgctatgacaaatacagcggttgtgaaaaagaaaagcacgggcttttgggtgcggcgggttctgctgtacgccgtgctggtcatcatcggcgtcgtcatggtgatcccgtttctgtggatgctctccacctcgctcaaagagcagtacgacgcggtcaagatcccgccggtctggattccgccggtgccgcagtgggacaactacgtgaagctgttcaccgagcagccgatgctgcaattcatactcaacacgctcaaaatcgtgtttttcgtcgtcatcggccagctctttttcagcagccttgcggcgtactcgttcgcgcgcatcccgtttaaggggcgcagcgtcgtattcttcttctacatcggcacgctgatggtgcccgggcaggtcacgatgatcccgacctacctgatgtttgcgaaggccgggctgacggacaaccacctcgcgctgattctgcccgcgtttttctcggcgttcggcgttttcctgctgcggcagttcttcatgtcgctgccaaaggagctggaggaggccgcggagatcgacggctgcaacccgttcacgacctattggcggatcatgctgccgctcgttgtgccggccatgctgacgctcggcgttttcacgctgatgaacacgtggaacgactacatggggccgctgatctacctctccacgccggagaagttcacgatgacgctcggcatcgcctatttcaagggcgtgtatacgacgcagtggaaccttgtcatggcgggctcgatcgtttcggttatcccgattctggtcgcatatctctgcgcgcagaaatatttcatcgaggggattgctttcagcggggtaaaagggtaaaatgcaggtaagggcccgcgtgtgcgggcatgacggaggagatacgtatggcaatgacgctcgcacagggcgccgagcggctcaccgctctttcggcggcgctgctctcggcgtgcaggaaggaagcgtttgacggaacggtgctcttcacgccggacggcgtcggcaattacgacgcgctctgggtgcgcgatttcggctacatcgcggaatcgtgcggcgacctagtttcgcgggaggagattcggcggtgcatcgagtttatcctgcgcggccagcgcgccgacggctggatgccggaccgcgtggaggccggcggcgaagccgtgtatgcggctggggcgaagggcgcgccggtcgggctcgcaaatctcgacaacacgcccttcctcatctttgcagtttatgtttatttcggattggtcggcgaagcggcggccgcgccgctgtttcgcgcgtggtgggaaaagctcgaccgcggcatggcgtgcatcccgctttctgcggacggcctcgtgtacaacgaagccgcggccccgcactcgccctacggttttacagacaccgtctgcaagacggggcggctgttcatggaatccgttttgttctggcgcgcgtgccggcagatggaggcgatgcaccgcgcgctcgcgggagatgcgcggatcgccggccggtacggtgcgctggcggcgcatgtcgaacgggccgtgctggcgctgttcgacgcggagagcggcgcgtttttggcggcggacggcgactgccggcagatcgatatatggggcatgttgtacgcgctgtacgtggatttcccgtttccggcggaaatccgcgcgcgcgtggaagcgtggctctcggagaaccgcggccggtacatctataaggggcagatctgccagcttcccgacggcgcgccgtgggagaagctcttgatcgaggtgcccgccggcgagtaccagaacggcgcgtactgggcgacggcgagcggctgggcgctcgatttcttccggcgcgcagaccccgcctttgccggggaaatgctcgaggcactcgtgcgggatttcgaaacggacggcgtctgcgagtgcatcaacgcgggctataggaagctgccgcagtttgtcgtcagcgcggcgaatgtgcgtggcgcgctgctgcggaacgaaagaagttgattcgcgcgcccggcagtctgccgcaccggtgcggcacgtcgccgggcgccgcgtttttagatgccatagggcagaggagtgaaagaaaatgctgagacaggacggcaataaaattgtgtgggcttacgacggcgagattttgcaggtcgagccgtggggcgtcggcagcgtgcgcgtgcgcgccgtgaagatgcagaaaatcggctgtgcgccggactgggcgctgctgccgcccgcaccgtgcgcggtgcagatcgcggagacggagttcgaggggctgcgggcgctttgcatggaaaacgagaagctgcgcgcctatgtgcaggagaacggccgggtaacgattcaaaacacagcgggccggacgctcgtgcaggagtttgtgcgcgaccgcacggtgcgcggcacgaatttcagcgcgatgatgattccggcgcgcgactttaagccggtgcccggcggcgggtacgcgctcaccgtccgctttgagtccgaccccgaggaaaagctcttcggcatgggccagtaccagcaggagatcttcaatttaaagggcactgtgctcgagctcgcgcaccgcaacgcgcaggtcagcgtgccgttttacctttcggaccgcggctacggctttttgtggaacaatccggcggtcggcacggcatcgtttggcacgaaccgcacggagtggcgcgccgaggcgacgccgcagatggattactgggtgacggccggcgacgcgcccgcggagatcctgcaccgctacgcgcttgcgaccggcctgccgagcgcgatgccggattttgcgacgggcttctggcagtgcaagtgccgctatcagacgcaggcggagctgctctcggtcgcgcgggagtacaagcgccgcggcctgccgatctcggtcatcatcatcgatttctttcactggccgaatcagggcgtttgggatttcgataagaaatactggcccgaccccgcggccatggtgcgggagctcgaggaaatgggcatccggctgttcgtctccgtatggccgacggtggatccgcgcagcccgtactacgcggagatgctcgagaagggctacatcgtgcacacggaccgcggcgcgcggacgatgctcgagtgcagcggctacgagacgttcttcgacgcgacgaaccccgaggcgcgcgcgtttgtgtgggataagatcaaaaggagctactacgactgcggcatcaaaaattactggctggatgctgccgagccggagagcatcccctaccagtacgacaacttccgctacgcggcggggcccggcgcgcaggcggcgaatatctacccgttcgattacgggcggatggtgtatgacggtctgcgcgctgcgggcgaaacggagatcctcacgctggagcgctgcgcgtgggcgggcagccagcggcttggcacactcgtctggtcgggcgatatcgtctccgatttcgagacgatgcggcggcagatcgtcgccgggcagcatatggcgatggcgggcatcccatggtggacgaccgacatcggcggctttgtcggcggcgatccggaggaccccgcgttccgcgagctgctggtgcgctggttccagtacggcgcgttctgcccggtgttccgcctgcacggcgtgcgctcgccggagggtgaaccgctttccaaagagcttggcggcggtatggcgccgagcggcgcggcgaacgaagtgtggagcttcggcgacgaggcgtatccgattttaaaggattacatgcagatgcgcgagcggctgcgcccgtacatccgcggcctcgcggaccgctgccatgcggacggcacgccgatcatgcgcccgctgttcttcgatttcccggaggacccggcggcgtgggagcaccgcgacgcctacatgttcgggccggatgtgctcgtctcgccggtcacgcgcgcgggctgcaccggaaagacggtgtacctgcccgcaggcgccgaatggatcgaggcggagagcggaaagcgctggaagggcgggcagacggtgttctgcgaaacaccgctcgcggtgctgcctttgttcgtccgcgcggatgcggaattggattggaaattgctgcgcagaacgcagtgatcgataaggaggaattgtattatgagtcaaattcgagtgggaagcgttggcatcggcggtatttcgagaggcgtgcatctgccgggcatcgaccgtagcccggacctcaagctcacggcggtgtgcgacatcgaccccgaggcgctgcgctatgcgcaggagacgtacggcatcgacgaggcacactgcttcacggattaccgcgacctgatcaattgcccggacgtcgatgcggtggatatttccacgccgaactatgtgcattacgaggtggcgctcgccgcggcggaggcgggaaagccgtacgccgttgagaagccgatcgtcatgacaagcgaggaggcggatcatcttgcggcagtcacggcggaaaagggcgtgaaaagcatggtgtgcttttcctaccgcttcaaggccgcggcgcgctatgcgaaggatctgatcgagcgcggcatgatcggcgatatctaccacgtcgatatgcagtattatcaggcgtggggcctgccgcactgcaacacgccgctcgtctggcgctttgaaaagcggtataccggctccggcgcgctcggcgacctcggcagccacgcgctcgacctcgtccgcttcgtgaccggcaaggagtacaagcggcttgttagccacacgggcacgttcatcggcgcgcgcgaaaggctggatggcagcggcgcgggccaggtggatgtggacgacttcgcaaactacttcgccgagatggacggcggaacggcggcgacgttccgcatcacgcgctacggctacgggcgcggcaattaccagacgatggagatctacggcagccgcggcgcgattcagtacgagctggaccactgcgcgcccgacaccgacgagatctcgatctgcatcggcgaggcgaacgcggaagcgcatgtgttcacgaaactgccgattccggcgaaattcaaggtggatcagatgcagtcgtttgccgacatcatcaacggaaatccggacggcaaggccgcgacgatcgaggacgggcgcgtcaaccagcacgcaatggacgcggtgctgcgctcggccgagagcggcacgtgggaaccggtcgtctgattcgagggaggaacgggcggtatagagcccgcccggcagcaaagaaaggatggtcacagtatggcaatcaaggtaacggtatggaacgaatacctgcacgagaagcagtttgaggaggtagcggcgatctacccgaaggggattcacggctgcatcgcggagtttctcgaaaaggcggggatggaaacaaaagcggcaacgctcgaggagccggagcacggcctgacgcaggaagtgctggaggacaccgacgtgctgatctggtgggggcacatggcgcacgagcgcgtggcggacgagatcgtggagcgcgtgcacaagcgcgttttggacggcatgggtctgatcgtgctgcactcgggccacgcgtcgaagattttccagaaagtctgcgggacgaactcggtcatgctcaagtggcgcgaggacggcgagaaggagatcctgtgggtggtggacccgagccatccgatcgcggcgggactggatgaaaagatcataatcccgcacgaggagatgtacggcgagcacttcaacatcccgcagccggacgagcaggtgttcatcagctggttcgagggcggcgaggtgttccgcagcggttgctgctggcaccgcggcaaggggaaggtgttctacttccgcccgggtcacgaggtgttcccgatctaccatcaggcggagattcagcaggtgatcacgaacgcggtgaagtgggccgcgccgatcgagttcgcaaaggtttcctacggcaatcccccgccggtcgtgccggtcaagggccgtatggagggcaagagcattcagggcctgcacgaggaaaagcgcgcagaggcgtaaatcagccgcctgcaatgcggataaaagaaaaaacgtccgcccgggatatacgggcggacgttttgctcggcggcttccggcagcactcacagcttccggttccagaacaatttgaagagatcgccggcaaccgcctgcacgaatacgatgacgaggcaggtcagcgaaaccgggatgctgaaatagccggtgacgatgacggcgacgagcagggcaagaaggcaggtgcggaatgcgccgctcagcgccttgtcgcacacctgaatccggcgctcgtcgttgtttttcgcgtagagccggcgcagcttcttctcgctgcgcagcgcgagcagattccggatcagcccgatgacgaacaaaaccgtaacaccgaaggcggcgccggcgataaacccggcgtacatgccggcccagtgcgcgtcggatacggtgggcgcaaaaacgccgcagaaggccagcacctgcacggcgatcaggcagagcgtgccgacggcgatcagcaggttctgcattttgaggctttgtctgtatttttccatagatgacacgttcctttccgtggtcagcgctttcacgcgtccagatcggagaagtcaaagacctcctcgatggtcagcccgaaaaaacgggcgatcttataggcgagcggcagagaggccgtatacttgccgacctcgatggaggtgatggtctgccgtgtggtgccgacggcgtcggccagctcctcctgcgagagcttctgcgccttgcgcagctcgcgaatttttgttttcatgcgcaccgtcctttccgtttaaaatagatgctaagttaactttgcaaaataagcatagcatgctttgcataaattgtcaagtgtactttgcaaaaaaaggatctgcggcagttcgtatgcggccggcctgcgtgccgtgcaggtgggaaaaagccgtgtgcggcagccgcgcggtcggcgaaaggcgcgcggccgcatgccctgtgggcgcaggcttctgcccgatgggacaaattccgccgaaatgcgcgcttttccgtattttggcgaaagaaaaactgcggaaagttccttgaattttcttgcaatttcccgtgtatcaggtataataaacacatatgccgcgatggatgcggcggcgtccggcggaggagtgcgcgccgggcgccgcatactaaagcgctgggaaacaggaattttgtgccggttggcaggataaaaggtggattgacgcatgcccgatttagagccgctgtttgaattgaaagagaatctgtacaaggagacctgcccggtcgtgctggaaagcggcgcattggagcaggtgctggtgcctgccgccgtgccggagcaggaggacgcgccgcccctgccgcccgagacgcggaacgtcgtgcgcatgacgttccggaatatcgacagccgcgcggtcacggcgctgttcatcgacctgcacgtgttcgacaaggtgaacaacgagaccgaggtcatccgcgaccgccggtatctcgtgccggtcgcgggacgcgacgagacgttcggcggcgaggaggagatcccggtcggcgcggcggccaacagcttttccgtcgcgatcaaaaaggtggagttcgagggtgaggacgtctggaacggcagcgcctcgctgcttttcgatgcgattcccgcccgtcagccgcttgaaagcgcattccccgaggcggaggcgctgctcgagcagtaccgccgcgatttcagcgcggagcttgcggaaaagccggacggcgcagaggccgtctttgtcccggaaacgtacaaggacctgtggctctgcgcctgcggggagatcaaccgcgcggacgaggaaaagtgctttgcgtgcggcgccgcctacgagccgcagcgcgcgctgttcgacgaccgtgaaaaattgcaggaaaatttagaggcgtacgaaaaggccgaggcggaaaaggccgagcaggcgcgccttgaggcggagcgccgcgccgcggaggagaaggccgccgccgaggaggcggagcgccgcgccgcggaggagaaagccgccgccgaggaggccgcgcggaaaaagcggctgcaccgcaagatctttctctccatatcgatcccgctgtttgcgctggcggccatattcgccgttgtgctgattacatacctgatcccgcagagccgctatgattcggccgcggcgatgctcgagggcggcagatacgacaaggccatcgaggcgtttgcggagctcggccgctacagcgacagcacggcgcgcatcaccgaggccgaatacggcaaggcggcgcagcttttggagaacggcaagtacgacgaggctatcgccgcatttgaggcgctcggcgattattcggattcgaaggagcagatcaccgaggccgagtaccgtaaggcgctgaaaacgctggattccggcgcgtacaacgaagcgctcaaacagctcgagccgctcgaggactacaaggatgcgaaggaaaagatcgagctgtgctactttggtctcggcatgaaagccgtcgaggcggacgacgtggaagcggcggcggaaaactacgcgcatgtgaacgcggaccatgcggtcgagatgcagaaggcgttctgcgagaaggggatcgccgcctacaacgcgggcgacgaggcgcacgcgcaggaatatttcgacctcgtgacggagaaagacttgctgcccgagatcgatgcggcttattacgcgcgcgggcttcagcttgtggacgacaaggattttgacggcgccatagcgatctttgaaaagctcggcggctatgaggactgcgcggagcagatccgccgcgcgcactacctcaaggccgaagcgctgtatgatgcggcggattatgccggcgcgctcgaggaattcgaggcttcggacggctacgacgacgcgggctcgcgcatcacagagacaacgtaccagctcggcgtgcagcagctcaacaacggcaatgtggtcgattcgtattatacgctctatgcgatccgcggcaatgcggatgcatatgcactgctcgtctcagattcgaggtattacatttatgtctacgatgtcggcgttggaccgaatccgctggacgaataacggcaggctgaacagaaaaatccggcgtactctgggcggtacgccggatcttttgtgttttgaagcgaaattctgcaaagaaaaaagcctccggatgaccggaggcggcgcggcgggggaaagcccgctcacgcgcgaaagcaagcgtgtggggacggcccgctgtggggagcggaggccttgacgcccgggaggtgtcacgaatttttttgccggtagagcagcatggcggcgcgttccttttgcagctcctcgacgagcgcgcgcacgctccacgcggcattgtgcggcgtgacgacggccttgagcgcgatcggctcgatcgcggcctgccggtaggcggcgaggaatacgtcgagcgcttcgccggcgccgccggaaaagatcagcacctcgggcagctcgtagccggccggcactttttcggcgggcgatgcttcagcggagaggcccgccagcgcgccgacggtgcgcccggcctctgtgtgcgccagcgcccgggcggcaaaatgcaggtcgcggcagagatcgaagatctgcgcgcgcttgctttcgttttttgtgtggaaaagtacggttggcatagggttcacctcaaaggtcgatgtcgacggtgtaatcgccgtcgatcaaaatggcgggcaggctgtgtgcacggcagccctcgagataggcgttgttggccgcgatcaggttttcaggggtcaggtccgggtcggccatgcgctgttcgataacgctttcatagcgcaaaatgtcgtcaaaccggcggcggatgtaatcctcgctcatcacaaggcagaagtaccggatgctttcgaggtattccggcgtgaagctctccgcccagtcgaatgggatatagcagccctcgaccaccatgttctgtccgttttcgatcgcggtcttgatcatctcgcgcaggatgggccagagatacggcgtgagcagatcgtcgtcctcgggcgtcagatccgtttggccgctgcggatcagccccatcttgaggtggtcgatcgagaggtacgggtacttgtatttttcgagcaggcgctgcgcgagcgcggttttgcccgtgtgcgtgttgccggaaatcagaataatcatggcagatcatcctttcgcttcttttcactccattatagcggaggacacagtgaaaagcaagcggtgcggtatggacaagttgtgtatcttctgcaaaagtattgtgaattttcctgaaaatcacacggttctccccttgactttttccctgttttcctctaaagtgtaagtaacgcagctcccgaatacgcgggagggcgaaattgtattgaaaagtaaaggagtaggttgtatgcgttacaaggttttgggcaagaccgggctcaaggtgtccgtcgcgaccgtcggcacgtgggcgatcggcggttcgggatggggcgccgttgaccggcaggattccatcacggcgatccgctcgatgcttgacaacgacgtgaacatcgtcgataccgcgccgatttatggctgcggctattcggaggaggtcgtcggcgaggcgatcaagggctatgaccgcgagaagctgatcatctccacaaagtgcggccttgtctggggcgagggcgcgccgaagggtggccgcgacgtttcgggcaagagcatcatgaaggagatcgatgattccctgcgccgcctcggcgtcgattacatcgacatctaccacgtccacaagcccgactacctcggcacgccgtttgaggacacgatgagcgcgatgatgaagctgaaggaaagcggcaagatccgccacatcggtctttcgaatttctcgatcgagcagaccgaggaatgcatgaagtacggcgatgtggaggtcatccagccgccgttctcgatgatcgaccagcgcgagcgcagcgtgcttgagtttgcaaagcagcacgatatcggcgtgatgacctacggctcgctcggcgcgggcatgctgaccggcacaatccgcacgctgcccgactgggacccgaaggacatgcgcttcgtgttctacgattatttcaaagagccgaagttctcgaaggcgcagaagctcttaaagtcgctggataagatcgccgaggcgcgcaatgtgccggtggcgcaggtcgccgtcaactggatcacggtgcacccgctcgtcgacaccgcgctgatgggcgtgcgcaacaagcacgaggccgacgaaaactgtgcggcgaccgcatgggagctgaccgcagaggagatcgcagcgctgaacgaggcggtcgcggagtacgagcgcgagacgccggccaacggctcgccgacgaagcggtaagactttgcgctgtgccttttggtacgcggaaaacagaacataaaggggagccggactgcggtcacatgcagtccggctttttgtcagcagaaaaccacgcgatagtcgcgtggttcaaaagaaggcttgtgccgatgatgtagaaataaaaactccttttgttgtaaaataggcttgcggtctggcaactgcaaggacaacaaaaggaggacgttcaaatgaacgacacaaacagtttatcacacacgaaatggaattgcaaatatcacatagtgttaccgatagtaatctcaatcacacagggatttacctctattctaaaggaaaaatcatgattcatttgacctttgactacaaaaccgatgaaaaatgcaccacaccgggccaatatttgaagtatcaccggatattccagggcttcaccacaagagaactggcagaaaaagttggcattgtgcccgcgacactggttctgtatgagaatgaccggcaccccatcaagcacagtacagcggtggcacttgcaaatgcgctgggtattgatcacaatagacttctggacgagtatactgcgtttgtagattacccgtattcctctcttttgaaaaaggtacggcaagagctttctttaactcaaatgcaaatggcagaggtgattggaataggtcaaacaacctattccggctgggaaagagaagcccgcgttccgcgtcgtaaagagtacgataaaatccttgccgcactggaaaagctaaaggtaaatgtagatatatacctttgccagtcaacttctatctgattgtaaatcgcacatttgcagtgcagcgttctttctacggcaataccgcacagaaaagtaggcgcgatactgccagaagtgatataataagaccatggataaacagatgacaatgtctgcgcttagtgatgagttggcgcaggtacggacaaagaagaaagaatttctagcccagatcgagcggatcgtcccgtggaaggaatggcttacgctgatccagccgtgctattacaaaggagagcgcggcaataaaccctatccactggagaccatgctgcggttgtatctgctgcaaaatctgtatgacctgagtgatgaagcaacagcggcggaggcaatcgacagccgggcattttcagatttctgcggcgttgattccagcaatcaggtgccgaacggagataccattggccgctttcggaacctgctggtgaagaatggactgcaggagaaactgtttgcacaagttgttaccgcgctcactgaacagggccttatcctgaaaaagggaacgatcgtagattccaccattatttccgcgccgtcttccaccaagaacaaggagaaaaagcgggatccggatgcacatcaggtcaagaagggcaacacatggcactttggctataaagcccatgttggggtggataaggacagcggactggtacacacagtggaggcgacaccagctaatgtccatgatgtgacgcagacttcatccctgctgaccggtgaggaagatgtcgtttacggcgacagtggctatcttggagccgggaaccgtgaggacgcgatcgttcggaacaaatccggacgcaagatcaaatacaaaattaaccgacgtccatctcaattaaaaaagctgagcaagagcggccagtatgccgcaaagaaagcagaacacgcaaagtcttctgttcgggcaaaagtagagcacgtattcggtgtcgtcaagaaacagctgcaatttcgaaaaacgcgataccgagggctcgaaaagcagcgagccaaattcaatatcatgttcgcattggcgaatctgcttctggctgacaggccctgcctggcggcttgaagttgtgcgctctcgcgaagaaatgcgccgggaagcctatggtttcctgcctgatgggtgattcgacagcgcttgcctcagcaattgtgcggtgctgccctacatataatgaaagcgtaaaggaggaacgccctatgaaaaaacggaaattcaagatatacctcacccccgccgagaacagcatagtcatccagagccttaaccacctgcgcaatactatgcttcgtgaaaaccgggacaccggctgcctggatgaacttctgctcaaagccatgtgcgccccggtgaagaagatgtaaattacataacgctgcttgatgagccgcttattcttttcagcaagagtaagcggcttttttcatgcccatctttcggagttcccgcatacatagccgtccgtcttgccaacgggcggctaaatctaagaagaaggaggacatgaaaatgccggaacagagaagccgccccagggatggccgcgtgatcgcgctggccaaccagaaaggcggcacaggcaaaaccaccacgacggtgaacctgggcattggtttagcccgtctggggaaaaaggtgctgctcattgacgcagacccccagggcgacctcaccacctgcctgggctggcaaaaccaagacagcctgccaaccaccctggccaccgtcatggaaaaggtgatccgggatgagccattcaccacggatgagggcattttgcaccacagcgagggcgtagaccttatgcccgccaacattgagctgtccgcactggaaatgagcctggtcaacgccatgagccgggagtttactctgcggacctatgtcaatgaagccaagaagcactatgacgtggttctcattgattgtatgccgtccctgggcatgattaccattaacgccctggctgcggcggacagcgtgattatcccggtgcaggcccactatctccccgccaagggcatgacccagcttatgaaaaccatcaataaagtgaaacggcagatcaacccggctctgaaagtggacggggtgctgctcactctggtggatgggcgcacaaaccttgccagacagacagcggatacactgcggcagagttacgggagcgtgttgaaaatttatcgttccgagattcccgtagccatcaaagccgcagaaatcagcgccgcaggcaagagtatttacgcctacgacaaggggagcaaggtggcccaggcttacgcggatttttcaaaggaggtgctggcggatggcgaaaagcagcgggctaaacttcaatcttccctcagtcgatgacctgttttccacagaggaagaacgggccgaggcacggcttgaaaaagttgtcaacctttcgttttcggagatcagcgacttcccgaatcacccgtttaaggtgcggatggacgcagccatgcaggaaatgacggaaagcgtgaagcagtacggcgtattggtccctgccctggtgcgccccaaaccggagggcggctatgaaatggtggccggacaccgcagaaaaaaggcggcggatttggcggggcttgcggaaatcccttgtattgtgcggcagctcaccgatgatgaagccacaattatcatggtggactccaacttgcagcgggagcagattctgccctcggaaaaggcgtttgcttacaagatgaagctggacgctatgaaaaggcagcaaggtgagcgtacagatttaacttctgcaacaccgttgcagaagttagccggaaaaacttcccggcagatacttgcggaacaatctggcgagagccatgagcagatacgcaaatatatccgccttacccaccttatcccggaaattctggaactggtagacaactcggttctcaaagaccaggaaatgctccagattgccatgcgcccagcggtggagctgtcctacctgcgaaaagaagaacaggccgacttgttcgctatcatggacgagatggactgcaccccatcccacgcccaggccatcaaaatgcgccagatgtccgaagccaagactggaggggaacggctcgccaaagacgcccttgtttccattatgaaggaggaaaagcccaatcaaaaagaacagttcaaaatcccaaaagaaaaaatcagtcgattttttgcgccggggacgcccacgcagaagatcgaggacaccattgttaaggcgctggaactctaccgcaagcgccagcgcagtttagagagatagtccactaccaagggagcagtgcgcccatttgcaggggacaggcgttttcgctgttccccctctccacaccttaccccctcgtaccacctaaacagcctaaaaaagaagatatttggggaggctggttttttcaagaatccacaggtttgcagacagaacggatgaggtggagaacgcctggcgcgcctctcttttttagaacgtaaacagaatccagccgtaagcagcacatccaaagcgatgtgctttttttgcggccatttcaaggaggtaacacgatgaaagcattgagaaagcctctgtccctgttcatggccctgctcatgtgcctgggcgtgttcgtagggacaggaaccacggcttttgccgcaggcgaaaccatgacgacgtatatgatcgacctgccccgtgccagcgaccccaacaaggccggatggggccatcccgccctgaatttcctgggtggctggtccaccggagagaacgacagcttttccgtccacacccaggacgccttcaatggcagagccatctactgcattgagccgggcgtcggtgtgaataccggcgaccagtacacgggccgaggcgaagatttctgggataactacccgtccaacctgaaccccaccatcccgccggataccatcaaagaatatatcgggcggattatgacctatggctggcagggcaacgccagcacctcatggatgagtgggaacccggaggacgccagcaagatcgcgggatatatcgctacccagcttcttgtttgggaaactgttgtgggtgagcgcgacagccagtttaaccatgtggacgccaatgcccagggcaaaaacaacgtgacggaatatatcagcgccgatcatcccctatacagcgagattttcagccagtattccgccattgagagcgcggtcaagcgccacaccatgctgcccagctttttcagcagcgccgcagatgccggtgcctatgagctgaaatgggatggccagcagtattctctcactctcacggataccaacggtgtgctgagtgactacaccttctccagcagcacaaccgggctgaatttctccgtggacggcaaccagctcaccatcacttccgcccaggccatcaaaggctctgtgaccattaaggcggaaaaagtgactgcccagcgcagcggtgttgtagtttggacagacggcgttactggcggcggcaaacaggactttgccacctacggggaaaccgtttccgaccagatggtaggctatctgaacctggaagtgaaaaccggtaatatgaagctgattaagacttccgaggatggacaggtagctgggatcaatttcaccatcaccggcgaggggtacagcgccaccaagaccaccaatgaggcgggcgagatcgacatcaccgacctcaatcccggcgtttataccgtaaccgagcagtcgattgataagtacgaaccccaggaaacccagcgcgtgaccatcgtcagcggccagactgccacagtcaatttcaacaacgtcctcaagcgcggcagcctggaagtgacgaaaaccagcgaggacgggctggtggagggcatgaccttccacttgtacggcacatccctctccgggcagccggtggacgaatatgctgtgacggattccagcggtgtggcacgctttgaaaacgtgctcatcggcacgggctatgtactggaggaggtggatacccccatccgttatgtggtgccggattcccagacagccaccatcgagtggaatgaagtgacccacaagagcgtgaacaacgtgctgaaaaagttccgcgtcaccgtcaccaagagcgatgtggaaacaggcgcgccccagggagatggttccctggccggcgctgtgtacgggctgtataagggagacaccctcatcgacagcttcaccacggacgagaacggccagttcactaccggttattacgtctgcgattcggactggacaatccgtgaaatcagccccagcgagggctacctgctggattccaccatccacaaggtaggcgcggagccggagttgtatgagattgagctgaacgataccgccaacgatgtgacggagcaggtcatcaagggcgacattgccatcatcaagcacaccgatgacggggaaacccagattgaaacccctgaatccggcgcggagttccaggtgtttttgaaatcagccggcagctatgaaaatgccaaggaatctgagcgcgatgttctcgtctgcgatgagaacggctttgctcagtcgaaaaagctgccctacggcacttatatcgtccgccagaccaagggctgggaaggccgcgagctgatggacgattttgaagtgtatatcgcccaggacggtcagacctaccgctaccttatcaacaacgccaattttgagagcttcatcaaggtggtcaaggtggacgcggaaaccggcgtcaccatcccctatgcgggggccgggttccaaatttaccgtcccgatggcagcaaggtggaaatgaccttcacttacccgacgccgaccaccattgatacgttctacaccaattccgagggctaccttgtcaccccggaaaagctggagtacggctccgggtactctctggttgaagtacaggccccctacggctatgtgctggacagcaccccggtttactttgatgtgactgaggacaattccagcgaggaaggcggcgtgacggtgatcgaagtcactaagcctaacatggcccagaaaggaatcatcaaagtcagcaagaccggcgaggtattttcctctgtgacagaaaacgagggcgtttaccagccggtgtatgaggtgcagggcctgcccggcgcggtgtttgaaattactgccctggaggacatctacaccctggacggcaccctgcgctactctgcgggcgaggtagtggacaccattaccaccggcgaggacggaacggcccagagccagcccctctacctgggcaagttccaggtgaaagaaattcaattcccccacggcatggtggataccggcgagaacatcaccaacgtggagctggtgtacgcaggccaggaggtggaagtcaccgaaacctctgccagcttctacaaccagcgccagaaagccctcgtgacgctggacaaggtgctggagcaggatgaaacctttgggattggcatgaatggcgaaatttccgccgtgaccttcggcctctatgcccaggaggacatcaccgcagcggatggttctgtgatcccggcagacgggcttctggagatcgtttctgtgaatgagaacggccaggccgtttgcagcaccgacctgcctttcggcagcttctacctgaaggagctgtccactgacagccattacctgctgaatggcgaaaccttcccgttcacctttgagtacggcgggccttccgttgccgtggtagagatttccgccaatgatggcgaggctattaccaacgagctgatccgcggcgaaatcaagggcctcaaaaccgatgagaacggcacaggtctgggaggggctgtgattggcctctttcagagcgacgaaactgagtttaccgcagaaaacgcccttgccaccgccacctcagcagaagatggcagcttctctttctctaatgtgccttacggaaattgggtactgaaagagctggaaagcccggaagggttcatcctctccgatgaagtgatccccgttactgtggaggaagatgggcaggtagtggaaatctcccttgccaatgagcgcatttacggcgacctgcgtttgacgaaggtggataaggattatcccgacaacaagctcactggggccgagttcgaggtataccgcgacaccaacggcaacaaagaactggacgagggtgacgagctgctgggcaagctggaggaaaccagcaccggcatttatgagatgtcccacatcctctacggcggcgtgttcgtaaaggaaaccaaagcgccggagggcttcctgctggatgaaaatgcctactatgtggagatcagcgagaacggcaagatttacgaggtagaaaacgaggccgggattggcttcaccaacatggcccagaccggttccctgcggattgaaaagacatccagcgacggcaaggtggagggcttctccttccgcgtgaccggggccaacggatacgaccaaaccttcaaaaccgataaaaacggtgaaatcttcatcgagggcctgcgcgtgggcgattataccgtgtccgaggtgtcggacggggccagcgccaactatgtgctgcctgcggataagacggtgacgatttttgcggataagaccaccgtggcggaaatgcacaacgagctgcgcgacaccccgaaaaccggcgacgacagcaagccctggctgtgggcggctctgatgggcgtatctgctatgggcgctgccgccctgggcgttgcggcctatgtgggcaagcgtaagaagggcaaaaacaccgtgaaataactgcggcttgattctgtgttaggaggaatgatttcatggaactgaaaacgatcattgccattgcgctggtggtattcatcatcggcggcctgattttcctgaaagtcagaagccggaagaagtaaccagccaggggcggccatgcggagccgccccttttacataccaaaaaagaaaggagctttgcagatgagagaacgatttgaacaacggctgttccgcatattcgcccaggctggttattccccggtgcagcttctcaccatcaccccggaggagatggtggagatccccggcattaccgttcccaacatccgggcggtgctgtgcgtccagaacaaggtgctggcagaccggaataaagtccgcagcggcaggctggtggaggaattgctaaaagaagccgaagaaagcaggtgttgccatgaatgaattgcacctgctggacatactggcggcccggcatggctgtttcatctccgacttaaatctttcacccatcctgcggcgggcggcccttttggacctgtgcaggatggatgagaacagctacccgctgtcccaatggcaggacacggtgcgctaccttaccggggatgaacgggattttgccagtgtaaaagagatccaagcatttatcaaacaggatatggaggcagagggatgaacgatgattccacagaaaaacgcatggcgggtgattatgaggtcatccaggcggtgcatataggcgaccgcgaggttgtcctgggggaaaatccgcaggatgaaaccggcatgaagtatatgtgcgccttttgtcggcaaaacgccttgtttgctgaatacagcgaagtgatggccagtgatgatttcccggagattgtggagctgttcggccagcggattgccgaacaggcgcagaaaacccacatagagctgaacaagccccgcatacagggcatagacgaccgccccatcacagcggagggctgtacccccatttcccatgaggatgatctgtacggaaaaatcgtggtgataaagccggaggtgctgcgccgggaataccgcagggctacccgtcagctcaagctctgtatgggaggctttggggcttccccgcacagcagggggtcagcctgttactgcgttgacctttatactggcaaagagagccgctatgaacgcatggacgtgctgggaacgatacagccggaggaccttcccggctgggccaagcatggacttacctcgattcagcaggaacaggctcaaaagaaaaccacgaaggagcgtgaacgatgatggattacagagaaaatgccggatatatcattacggattcctgtcatgtgggtgacagcgaatttgtcttgggcgttcatttgacagcgccccagcagtttgtcacctggaaatgcagtaaccggacggactacgattggggccactatttcagcgacctgttttctgcgcagaaggatttggtggcgcgggcgcaggaggaggtgcagtgcctggaggaacagcggcaaaacaccattgtgccggaggccccttcctactccccatggggcaatatccaggaatgtgaaacgctctgccccggcgtttattccgtttccaccccggggcatggcggaattatggtgcgccgggaactggcggaaaagatattccgaaaagaagcgatgggctgcgcctttgtggagggcggctacctctgctttgaggaggactgcgacgcgcaggtggctttccgggagctgatggataaaaagatgatccaggctccggtgaacgagcactttggccccggcgcgtatgaggcggttatcaatagcagcgtgcaaattcaccaccccgaatattggcaggcacgggaaaaggccatatcggaacaaaaccgacaagcgaaaaagaaaggacgtgaacgataatggagctgaaaatcaccagcatgaccccggcggatcgcctgtatgcgtacaaccagagcagccagcttgaagggcaaaccggctgtatcggccatctgcgcggggattttggcagcggccaggagttttacacttcctggttcgaccaccgaagtgaatacaagactgatgaatttaaggcggagtttgatgaagtggtcaacactctgcgggagaaggacgggctgctctgcacccgtgacagcatgaccaagcactgctatcagcgcccggaggctgagtttgagggaaactactgcgccgagtacggttttaaggtgcagacgccccaacacacctatatgctccggtgcaaccccaattatggagactacaacttttatctctacgcctacgttgcccgattcctggaacaccacatggaaaaggccaaacagggcatccggtttatcacgcccggctacaaggagctgtttcgtattccagatggcgaccacatccgcattttcacgggcggtggaggaacccgcgaccgcacttgccggtttattgacgaaacccattttgaaaccagtggagggtattccagcgccctttaccatatctgcgaatttgcagagcgtttggagcagtctcacgggagcgtgatcccgctgcgttcttctctgcctgtacagtgctttagtacgctgccctcatccggagagttgattcttctgaccaggggcgaaaaaggatacaacccctgtcctgaattttcagcggcggacgccggagaaaatcgcagatttgcagaggacagcaatggaaaaaacggcgtcaccaaagcacaggaggccgccatgctggccggctccatgtttggctggcagacccccgccgccgatcccaaaaactatgacgagcaggggcagcccatcaggcccaggcagaaagatcgaggtgaggcccgatgaagaataggcataatcaaatctgggcgcggataggcatgacactttctcttatgccggatgaaatggagctgcttgtttctggaaacgacttggacaaacggaaatgtctttcccggatttttatggagggcagagccgtggttaatggtgacagctatattccagattctattatggagaagtataacgaaacctatggaacgaattttgactgcggggacgtggatttagatacagaagaactctccgggaaaactgtgtatttgggtaaattccctttaagaaatcgaggtgaagcccgatgaaggaggaaagacacgtcatctggagcaattatggcctggactatgaggattggcgggacgatctggaggcagaatacccggatttatccgaaaatgagcgcatttctctgatgtatgaaatcaatggggattacctggatgatgaacgcgctaacctcaatgtgcagctctcccagccgattttagtcgtaggcgacctgggcctgtggaatggtcggcgcatgggatataaggaaatccccagcggcaacatccgggactgcctgtattccgacacagattattccacctggtatgtggaccggctgggcgatctgcggtgcgacgccatccaccacgatggcacgaacttttacctctaccgcgtttacaaggacagcgccagcccttctcaaattgaactgctgaaagaaaaactatatcgcagcattgcaacccgcgccgatattacgagagtgacccgcaggctgggcgacgacatcgccaaagtctacgggttttccattccccggcagcggcaggccgccgccatggaaagatgaggtgataaaaatggcgtctttaccgcccgtaaaactggatacgcatgaggactggttcaacttgctgatgacggttctccatcagcaggcggaacagaacccctatgaagaataccgggagatggctcaaaagctgatcgaccagtttatgcgttatgggaggccctttgttgacagcgaccatgcgccctgcgtggcgcttcggatgtacccgaaggaggctggaaataccatctggctgttgctgctctccctgtgcaatcaatatgaccctgataaggattacagcgcagaactgaaagctgcgaaaaaagaataagaaaaggaggggtaaccgatggcgatacgatataaagccttgacggagctgtatctggaaacgcagcgcagcgtgacagctcccgaccagtggcgggcgtttctggcttctgcctgccgtaactaccggctttctttcgatgaacaactgcttgtctacgcccagcgcccagacgccaccgccgtcctggagatcgagcgatggaaccggcaatttgggcgctgggtaaaccggggcgcaaacggcattgccgtttttgacggggaacacaatggcaggccccggctgaaatactactttgacatttccgatacccatgaagcccggttcccccggcccgtccccctttggacggtgcgggaggaatacgcgccggacatcattgaaacgctggaaaacagctttggggaactggagcacagggaggatttgggcgaagccctgctctctgcggcaaagaacgccgtggaggacaatatgcccgactatctttctgaattgaaaacccttacggaaggcagctttctggaagaattggacgagctgaacctggaggtggaataccgaagggtggtgcaaaacagcattggatatatgctgctggtgcgctgcggcattgatccgtctggatattttgagggcatggatttccgagatgtgacagactttaacaccccgcagacgttgaacgccctgggcgtggccaccgggggcatctcccagatgtgcctttccgccatttcccgcacggtccttgccctgcaaagacagccccaaaaagaaaatcgcacatttgaacctcagcagaaaaaccagtatgctgtaactgaacaggaaaacacacagccggaaaggagttttgaatatgaccgagatcacttacaccaggcagggcgactacaatctgccgaaccttctgccgccccaggaggagccggttccccatgggaaatacgcattgcttcggaagaaattcctcaaggagcaccgcagggtgacgtacaccaacctgctgaccagcggcaagctgaacagccatctggcggagatccagcagaccgcccagcgccggatggagcagatcgtggcgcagatggccaaggctcagggcgtgacggaggaactgaaggccagcgaccagatgaaatgggtgcaaatgatgaacaacctgcgcaacgcagcggaggaaatggtgctggcagaactgatttacagctaattgatgaaccggaagaaagcgcaggtggcgaacagctccctgcgcttttggatgaaaagcagatcatggccatcatcgccaacaaggacgatgacctgaaatataagaaaaatcagatcgagcttttcttttcggttcacagcgacgttcaggaacgggcagaatatctgaaatccgcttatcaggaccggtacaccgagatcatctctgacgggcagcgcctgggatataagccccaggagaatggcctgctcatgtgggaaggctcttacccatcccgcaccagggaatccgttttttcctgggatattgtggcccagtggaccgcccagctcattgacaaaaaagaatatttcattcagacggacatcccaaggctccccgaccaagagagccagcagatgtccctttttgattttgcggcgtttcagcagccagtccaggccgagggtacggcccaaccatctattttccctcacccggctttgccccagcaggtgatcgacgaggcgctgtgcattggtgccaacgaccagaacagccgcctcattatctgcgcctatttcaaaaaggataagccggacaatgccaggttcctggcggagcactatggcgagaacggcgcaggcttttatttggatggccgacagtatgccatctggtacaacgccgagggaatccgcattgcccagggcgaaagcgcccagcgttccagcgccacgctcatcccttgggaacaggcggcggcccgtatccgggaactgctggacttgggccggtatatgcctcagagcgaactggaccgggtggacgagtacgagcgccagcaacgggccgcgcagctatggtatctccggcaggattttgcagaaggcaccgccgacacgggctatcttcccacggtgaatgccatttacggcaaaaatcatggatttccagaggaaagcgccgccataagcgatttgttaggccatccagaggggttgcagaacctgcgggatgaattggagcagtttgtccaggcatacagagagaaccgtgaactgctgcggttccatttccaccgtccgcaaaaattgctggaacagctttctgacctgcagagagaaccgctgcactttaccgccgcagaggggtacgacccccagcggcgttttttcatctccggggacgagatcgacaaccttctccggggtggaaaacgcagcaccgattaccggctggccgtgtattctttctaccgcaaccacacggagcgcaaggaacgggagaatttcttaaagcactaccacggcgagtacagcggccattccagtgggaatgacgatgtaacctaccagctcagtaaaggcgtttctttcagccatggcgatctcactcggccctacgccaaggtggagttgaaatggaacgccgtggagaagcgcgtcagcgccatgatcgcccaggggcggttcctcaccgatgaggatcgcgccgctatgccgcagtatgagaagcaccagcttgcccgaaatatccgcgctttctttgagaacgtaccccaggagcagccccacccctatccctttggctttgactattgggacgcggtgaagctcatcgagccgcagcttgacgacccggcccgtgtggaagaaatctatcagatgatggtccccgtttggggggccaccccgcaggatgacaggatgtacgccctgcgccagcaggcgtttgaaaacctcactgccttccggcagggaacctttacgctttttgcagagcacaaggagccggtggctcctgccatgccgcaagccaaagcctacgacctgggctatggccatttgggaaatgggcttactgtgtggaaccgactggaggaagaacacggggactacaaaacggttgcccacatcgcgccagatcgcgcggtgacgatttatgatgaggaaatgccccaggaagtgcgggaggaaatccagcggattgcggatacctcggagataaccatatccgccacccaggacgcgctggtgttcgccgtgccgcccagggtacaggaaccgcctcaaaaagaagaaccggcagacccctacccggagctggccgcccaagtgctgcgctttgtgggagagtttgacggttcccgcatgggctatggtgaagatgacgcccaggcggtggagaatatcgcccagcagctccatgaccctgttcagcgggaagaaatccgcagactgcttcaatccttcctggaccatgcggacccggaagaagaaatcgcggtggacatcaccctctgtatggagcagatcgcggagctgcccccgacccttaccccggaacaggcgcagatagaagaaatcgccggttatctggaggaggccggatatgcggcttccagcgaactgatcgaagaaggcttgatggattaccgtgctcatggcggcaaaggtaacagccgggatgttgccgactttattgagcgcgagttcttgtctgaggagctggaacctgcttcattggagatcgccaaagagtttatcaacgatttttgcgtggccgagtatggcagcccagccgatttcagtgatctggaaaaggtgggtattgcctacaccaccgttacggacgaggaaatccccatccaggtcaatggcgatttggtccattaccgcattgagcgttatctgggcgggcagtttttggagcgcaggcagtatgagagcctggacgaactcatccaaaacgaactggcagaactggcttttgaccaactcacctctgtggaccaggactatttcaatgaaaaataccctcccgacatagagccatacatcttctgcgagtggagcgaaagccccgtgtttgaagatggaaaacgctacggtatccgtgaattcgacaccctgatgaaacaggcggatgaggagcaagtggccggtgcaaaggctgctcttgaaaaatacggcacttggcaggcgtggtacgaatccgatgacccagaaaatgctcggttcctggggtatgacaaggtgaaatttaccgtggtcatgccagatggcaccacctacaccgagcgccaggatattggagatggtgacgggggcgtcctggacttcctcgcacaatatcccaaataccaagacatccttcccttgttgcagcaaagcacaccaccacaaaatgattatatgcttttaagccgcctcaaagccgactgcgactacttcctggacgctggcggacgtgcggaaaagcatttgtgggccgggaacgtgcgggaacagatcgccaaaatgcgcgaactctatggtgccttgccggaaaaaccggaatggctcaccccggaggacatcgaccgctacgcccagcgtatggaaccgccttttgaggtggtggtgtaccaccgctttgaaaatggttttgatgaacagctggattaccaaacgctggcagaggcggaacaggcggcgcagcaatatgtggccggaacaatggagggcgaggacggctttgcctatgacggcgctggtatctacgatttgaatgagcaccggtggctgcgggtttacggggacttcccagatgaacgggccatcgagcaggcggcgcttgccgcagaggaactgcaaaccagccaggagcaggacgttttacagcctaaaaaagaagaaccggccccgctgctgcccaaacgcccccggcgtgagcgcattactttcacaaccctgcacccggagatccccagggatcagcgccatgatttccacatcaccgacgacgccttgggccacggcacccccagcgagaaatacgccgccaatgtcgccgctatccgcacgttgaagcagatcgaagccgaggaacggctggccacgcccgaagaacaggaaatcttatcccactatgtgggctggggcggccttgcaaactgctttgaacaaaccagcccccactatgaggaactgaaatccctgctggatttggaggaatacgcggcggccagggccagctccctcaccgctttttacacgccgcccgtggtcatccggggaatctacaaggctctcgctcagatgggctttacccagggcaacattttggagccgtcctgcggcaccggcaatttcctgggcctgctccctgcggatatggcgggcagcaaagcctatggcgtggagctggattccatttccgggcggatcgcggggcagctttaccagaacgccagcatttccgtgaacggctttgaaaccgtacaaatgcccgacagcttttttgatgtggccgtgggcaacgtcccctttggggatttcaaggtgttggataagcggtacgacaagcaccactggcttatccacgactatttctttggcaaaacgatggacaaggtgcgccccggtggtatcgtggcgttcatcaccagcaagggcactctggataaggaaaactccgccgtccgcaaatatctggcccagcgcgccgacctcattggggccatccgcctgccggataacaccttcaagcagaacgccggaaccgaagtgaccagcgacatcatcttcttacaaaagcgcgaccacatcaccgatttggatcaggattgggtgcatttagacacggatgaaaacggaatccgcatgaaccgctattttgtgcagcatccggagatgattttgggcgacatggcgatggaatccacccggttcgggccggacagcgcctgcaaagcccgtgagggcgaagatttatcccagcagcttgccaatgccatccagtttttgcaggcggaaatcaagccctacgagctggaggaactggacgaggaagaagatcgctccatccccgccgaccccagcgtaaaaaacttcagctacaccgtggtggacggccaggtgtactaccgggaaaacagcctcatgcacccggtggaagtctccgtcacggcggaaaaccgtatccggggcatgatcgagctgcgggaatgcgtccgcaggctcattgagtaccaaaccgaaggctacccggatgaggatattgaagccgagcagcaaaagctcaacgccctttacgacagcttcaccgccaagtatgggctgctgaacagccgcggcaacaagctggccttttcggaggactccagctactgtctcttgtgctctctggaagtgctggacgagcagggcaacctaaaaagaaaagctgatatgttctccaagcgcaccatccggccccatgtggctgttaccagcgtggacacggccagtgaagcattggcggtgtctatttcggaaaaagctcgtgtggatatggactatatggcagagctgtcgggcaaatccccggaggaactggaaaaagagcttgccggggtgatctaccggaatattcgctgcgcggagaacccggaggacatcctgccttctttggcggatttgagccgctatcctcttgtcacggcggatgagtacctttccgggaaagtgcgccacaagctgcggatggcaaaagcctttctggaagtggcccctgacaatcagaaagaaaccgcccaccggaatgtggaggctctggaggctgtccagccccaggacctgggcgctggtgaaattggggtgcgcattggcgcgaactgggtgcccatcgaggtgtaccagcaattcatggtggagctgctcacccccaattactatgtgcgggaccgtatcagaatcctgcgctccgaagccaccggccaatggagtatccgggagaaaaacgccgaccgcagcaatgtgaaagccattaccacctacggcaccaagcggatgagcgcctaccacatcctggagcagaccctaaatcaaagggatgtgcgggtatttgactatattgaggacgagaacggcaagaaaaagcctgtcctcaacaaaaaggaaaccgcgattgcccaggaccggcaggaactcatcaagcagaagtttgccgagtggatctggaaagacatcgaccgccgggaactgctgtgccgtatttacaacgaaaccttcaacggcgtccgtccccgtgagtatgatgggcggcacatccggtttgagggcatgaacccggaaatttccttacggccccatcagatcaatgccatcgcacacattttgtacggtgggaataccctgctggcccacgaggtaggggcaggcaaaacctacgagatggtggcagccgccatggagatgaagcgcctgggcctttgcaccaagtcgctgattgtggtgccaaaccacatcacggagcagtgggcggcggagtggctccagctttatccaagcgccaacattttagtcgccacgaagaaagactttgaaacccagaaccgcaagaagttttgcagccgcattgccaccggggactatgacgccatcattatcgggcactcgcaatttgagaaaatccccatgagcgtggagcgccagcaggctattttggagcgccagattgaggaaatcctggaagggatcgaacaggccaaggcgcagaaggcggaacgctacacggtcaagcagatggagcgtacccggaaatcgctggagacaaggctggccaagctcaacgaccagagccgtaaagatgacgtggtcactttcgagcaattaggtatcgaccgcctttttatcgacgagagtcactattttaagaacttgtttttggcgacaaaaatgcgcaacgtgggcggcattgcccagaccgaagcccagaaatccagcgatctatttatgaaaacgcagtacctggacgagctgaccggcgggcgcggcgtgatttttgccaccggcacccccatttccaactccatggtagagctttataccattcaacggtatttacagtaccggctcctgcaggagatgggccttgtccatttcgatgattgggcggggagcttcggagaaacgattacagccatcgagttatcgccggagggcaccggctaccgtgccaagacccggtttgccaagttttataacctgccggagctgatggctgctttcaaggaggttgccgacatccaaacagcggatatgctttgtctgcctgttcccaaggcaaacttccacacggaagtgatccagccctcggagcttcagaaagagatgattcaggggctggctgaacgggcagagaaaatccgtgccggtggggttgacccccatgtggacaatatgctccgcattaccaatgacgggcggaaattggcgctggatatgcggctcatcaaccctctcgctgccgacgaccccaatggcaaggtggctgtctgcgcccgcaatgtgtatagaatctgggaacagaccaaagaaaaacgctctgcccagcttgtgttctgcgacttgtctacccctaccaccgacggctcgttcagtgtttatgacgacctaaaaaagaaactgatggacgccggtatcccggaagaagaaatcgcctttatccacacggcagacagcgaagccaaaaagaaggagctgttttccaaggtgcgcgccgggcaggtgcgggtgctgctgggttccacggccaaaatgggcgcaggcactaacgtccaggataagctcattgccctgcatgacctggactgcccctggcggccctctgatctgcagcagcggctgggacgtatcgtgcgtcagggcaatgaaaatgaggaggtggaaattttccgttatgtaaccgaaggaacctttgacgcctatttgtaccaactggtcgaaaacaaacagaagttcatcgcccagatcatgaccagcaaggcccccgtccgtgtggcagatgatgtggacgaaactgctctgagctattcagagatcaaggcgctggctaccggaaacccgcttatcatcgagaagtgcaacctggatatggaggtggcgcggctcaatatgctgaaagccagccacttgaaccaggtatatgcgctggaggagctggtgtaccgcaagtacccggaggaaatcacccggctcacggaacggatcgcgggctatgagcaggatgtggcgctggcggcggcccaccccaaagctcaggagggcttctgcggcatggaggtggatggcaggcactacaccgaaaaagaggacgccggcaaggctatcattgatgtttgcacccgtatgacaggttccgacgctgttcttttggggcagtaccggggcttttccatggtgctggcttatgatggcaggagcaacgaataccggatcacactcaaaggcactctttcccatacggtgacgctgggggcggatgtgttcggcaatatcacccgcctggacaacgctctggaaaaccttgcaggcagcctgcaggccgagcagaacagcctggaggaaaccaaggcccagcttgaaaacgcccgcacggaattggctacaccttttgcccgcgaggaggagctggcggagaaaacagcccgtttgaaagagctgaatattctgctcaacatggatgagaaggacaaaacattgatggacgataccccagacgagggcgaggatgtgcctgcccggagggttgcggagctggcacggtaaaggaggatacgatgaccaacgaagaattgaataccagactctatgagaaaatgtttgcagaacaggagcagttccgggactggctgctttcccagccggcggctgagattttgaaccacgcctacgagtacacggtgcgggaggacatcctgatgtctcttgaataccacgatctggaggatagtcaggccagggcgctgctgaaatctggcaagcccttgaagcagatttttgagcggtgggagaaccaggaaacctcttatatggatacggtatgggatactgtccaggaacaggccagggccgccgaagccaaacagaaagccaaagcgcagaaagaaaggtgatcgcacatttgccattgcgctgtggggcaggtatagtataataaaaatcgtaacaaggggtgatgatagatggacgatagctactgcctgctcccggagcgcatttccgagcagttttctgaaatcgacagcgacatcgtgatggatttggcggctgccagcccggaatataccgagttgaaggcccagatggaggaactgaaacgccgaaatcctgtgattggcgctctgctggagggcaagggagaactttcttttaccgctgaggagcatgaagccttgaaggaatttatccggctgtatatgcgggccgataatatggaacgggaacacatctactttcggggccatgcagacgggtttgcctatctgaagaaaatcggcgctttcaaaactgaatagcccatgaaacggtgcggagcgatctgcaccgttttttacatactgaaacgaatatagccccctttacatagccagctaccccacatggggcggctaatctacggctatgtaaagggggctgtatttttttatgcctttttacgattcagaagccatcgaacaggcaaggcgggtggacctactcacctacctgcaaacctgcgaaccccaggagcttgtccatgtttccggcaacgtctactgcaccagggaacacgacagcctgcgcatttccaatggtaaatggtgctggttctcccgtgggatcggcggtttcagcgcgctggactacctcatcaaagtcaagggctgctcctttatggaggcgatggaatccatcgtgggcagggccgccatcccgccgccgtcccttgcgcccatccccagggaagaaacgctgaagcacctgcttttgccgccgcccgccccagacaaccgggccgtgctccagtatcttgcaggccgtgggatttccatggaggtgctggacttctgcgtccagaccgggcggatttacgaaagccggaacaagggtcatggaaatgtggtctttgtaggctttgacaaaaccggcaaggcgcggttcggttgtctgcgcgggattggcgagggccggttccacggggatttaagcggcagcgacaagcactattcctttgccctgcccgcttacggggagaacccggctgtccatctatgcgagtgcgccattgatgtcatgtcctacgccagcctttgcaggctgaatggaatcgactggaaacagcacaacctgctgtccctggctggaatctaccagccgaagaaaaggattgcggagagcaagctgcccgtggccctcacccgttttttagaggatcacccccatgtaaaaaccgtctatctccatttggacaacgacggccccggcaggatggccgccgaagccatccagacggtgctacccagggaatacgaggtcagggactgcccgccgcccaggggaaaagatgtgaacgactacctgtgccaacggctggggcttcccatccggggcgtgaaagaaaaggagcgagaacgatgaacgagtatgacattgcaattcgagagacgctggaaatgacggtcacagtggaggcagcgagccgcgaggaggcccgccggatggtggccgagcgatggaaaaacggcgaatatatcctggacgcggacagcttcaaggacgtggagttctaccccagggcccgcagccgcgaccggggcgagcgatgaattgttttttcggacgtttgggattcccctgcggggaatggaacgtgtatgtaccagcaagcatcgcctttgtgataccacaaaggcagcttgttagggggaacgccccctaatacccctttatcaaaacggaggttttctatggaaggattgttttttgccatcggttttctgctgggcggcgtgttcggcgtgctggtcatgtgtctgcttcaaatcaaccgcttaggcaggaaggaggattcggaggaatgagaaaacgcaacgtacacgtccagttttggctggacaaaaaagaggcggaagccttcaacaaaaaggtgaagcgcagcgggctttcccgcgaggtgtacctgcgccacctgataaacggcctggttccccaggacgcgccgcccccggcatactttgattttatgcgggagctgcacggcattggaaacaacttaaaccagatcgcccagaaagcccatgtgctgggcgtcatagacgagcgccgctacgaggaagaaatacggaagtttgaccagctcatccgggacatcaccagggcgatgattttgccaaagcctatggagtaaagcaatggctaccacatctatctggcgggtgaacggctggctgggcaaggttctcatctatatcgaaaacccggataaaaccgaaaacccagatttctttgaaaaacaggatatggacggcaaggaggcccagggcctctccgatgtgatcgagtacgccatccagcagaagaaaacgggaaagattgcggtggacgatgaggatgtgcccgtcatgcagcggtttgtgtccggggtgaattgcagccccatcaccgcccgcgatgagatgattgccgtcaaaaagcggttcggcaaggaggaaggcaccgtagcctaccatggctaccagagctttgcccccggcgaggccaccccggaaatggcccacgagatcgggctgaagctggcaaaggcattgtggggtgagaaataccaggtgctggttgccacccatttagacaaggcccaccacctgcacaaccattttgtggtgaacacggtttcattcctcgacgggatcaaataccaccgcacggaaaaggattacttcgacatgcagagggaatccgaccggctgtgccgggagtatgggctttctgtcattgaaaacccccagcggggaaaatccaaacactacggggaatggcgggccgagcaggagggccgccccacctatctctccctcatcaaagccgatgtagacgctgccatccgccagtccatgacggagaggcagtttttttaccgcctgcggcagatgggctacgacatcaaggtaggtaaagacatcacgctgcgagcgcccggcagggacagcggtagaaagctcatgcgcaacctgggcgaagcgtattccctggagaacatccgcaaacggattctggcccagcgccgcccccagcgggaacacaggccggaaccgctgcggtgcaggcttttgggggacttgaagcaggccaagaaggtcacgggctttcgcgccctctacttccactactgctacctgctgggggtactcccccaaaagcagaaccggcagcggggccatgtgccccacgagctgcgggaggatttaatccgggcgcaggagttgacggacgaggcaaggctgctttcccgccagcgcattgacaccctggagcagcttaacgcctaccaatcggatgtggaagcccggcttgccggcctgaccgaacagcggaaaaacctgtaccggaagctgcgcaccaaggaggcgcttgccgaccctgcccggcaggaacaaatccgggcggaggtttccgccctttctgcgcagatcaaagccctgcgccgggaggggaagctgtgtgaggacatcgcggcgcgctccttctccctcaaagagaagatacgggctgcccgcgaggaacagcaggctggaaaagcagagaaaacccgcgaggaacaaggccggaggaaacggctggaaaggagatgatcggttatgaatcacgcaggcgacgcggcggagcaggtggtgcgcatgagccttgagggtgcggaggttgcccttaaaatcaccggcgttgccgctaaaaatcttgccgcagccctttataccattttgaaagaccagaagaaaacaaaaggcaaggcccgcattgaggccatgctgcgggaaaagcggcccttaaaggtttacaccctcaaaaaagaggattgcccggagtttgccaggcaggccaagggctacggcattttgtacgcccccatcccggtgaggaagggggacgataccatcgacatcctggtgttcgaggacgacgcggcgagggccaaccggatcgtggataagttcaacctcacggtggtggatacggcgtccatcaaggaggacatcgaaaaatcccgcgaggagcgcggcggcgagccgcaggccccggaaaaagccgccccggaaaagagcgaggacgacaggctcttagacgaactgatggaaaaaccggcccaaaaagagaaaagccagccggaaaacccttctgcggagaaaagcgtcccttttaccccagcggaggaaaaatcccatccgtccgcgcctatctcagagaacagcagcaagtccgcaaggggtacttctgatgagccgcagaagccgtctgtccgtcaggagcttcgtgacatccaggcccagcggaagaaagaggcggaggctgcaaagagggaggaaccggctgcaccccaaaagaaggcggcccagaaaaccacgcggcaccagccgcccaagcccaagaagaaaccaaaatcgaaagagaggtaatcggttatgaataactttgacgatctgtttgaacagcagccccagccggaggccaccgagaagccggagccgcaaaaggagaagccgaaaaaacagtggtggcagatccgcgaggaaaagcagcgcaaggaagcctacgccaccctggacagggtgttcggcgcgttttccgaagggcacggcgacatgaaggcatatctggacacccagagccgcttccccttccactccgcccgcaacgccatcctcatcggggagcaatgccccaacgctaaacgtgtgggcggctacaaggagtgggcttcccagggcgttgagattctggaagaggaaaagcgcctgcccatcatcattttagagccgggcaaggcataccgccgcgaggacggcagcgtgggccagaacttctatgccaaggaggtctttgacatttcccagaccacggcgcgggacgaggcccagccccaggtgagctacgacgaccgcctgctcttaaaggccctcatcagcaattcccccgtgcccatccgcgcggtggaggagctgcccggccaggggcgcggggccatgttcgacccggaacagaacgccatcctggtgaaaaagggcatggacgcgccggacatcttccgctgcgtctctctggagcttgccaatgcccagcttgcccgcagcaacgcagagtattcccgcgaaaccgaaggctacaaagcctatgccgtcagctatatgctctgccagaggtacggcgtggaagcgggaggctacaacatctcccggctggacggcgtgcttcaggggcaagaccccaaggaggaaatcccggcagccctcaccgatatgcgcgacacgtttaaggagatcaacgggcgcatggcaagggccatgggcctctcacgcgcgggcaggcagaaagaacaggaacggtaaaggaggctgaatgaatggaacgacaggaaaaggttgtcctcacgctggacagatacgagcatggcattatgatccgcgccctcaacgaactgcgaaacgatatgctggaggaacagcgcgaccctggcccggtggaggatgttctgctgaaaaccattgacgccccagcccaaaaagacaagaaagcgaagcgccgggatgaagccagataacaaggcgggcggcccctggctctatgccctggggctggtcccggtgatctggttcgccctgctgattgcgcctgccatttccgggggactttcggagatcgtaaacgccctgcctgcggcaatgaacaatccattcaaaatcgtgtggtgtgaggacagtgtaaaaactgtcctcatttttattgccgcctatgggctgggcattggcatttatctttcttcccggcgcaattatagacgaggcgaagaacacggttccgccaaatggggcgatccgcgggccgtaaataagaaataccgggacaaggacccgttcaaaaaccgcatttttacccaacacgtccgcatggggctggatggccggaagcaccgccgcaacctcaacactttggtggtgggcggcagcggcgcgggcaagagccggttctatggtaaagtgaacatctgccaatgcaatacgtcactttttgttttggactgtaagggggagctgcttcgtgactgcggcggcctgctggaacggatgggctatgagatcaaggtgatagaccttctgaatatggagaaaagccactgctacaatccatttgcttatctgaaatccgacaacgatgtgcagaagatggtgacgaacctgttcaaagccactaccccgaaagggagccagtccaacgaccctttctgggacacggcggccagtatgctcctcatggcgctggtgttttacctgtggtacgaagcgccggaggacgagaagaatttccccatgattatggagatgctccgagccggggaggtgcgggaggatgatgattcctaccaatcccccctggacgagctgtttgaccggctggaaatgcgttccccggaccacatcgccgtgaagtattacaaggattaccgttccggctctgcaaaaacgctgaaatccattcaaatcactttggcgtcccgcctggaaaaattcaatctttcctcggtggcggccctcaccgccacggatgagctggacctttccagcctgggcgagaaaaaagtggcactctttgccctcatcccggacaacgacgccagcttcaatttcttggtaagtttgctgtatgccagcactttccaggaacttttttattctgctgaccggatacacggcgggagccttcccgtaccggtgcattttttgatggatgagttcgccaacgtgagtttgccggatgatttcgacaagctgctggctaccatgcgctcccggaatatcagcgtttccatcatcattcagaacattgcccagctcaaggcgctgtttgaaaagcaatgggaatccatcatcggcaactgcgatgaatttctgtacctgggcggcaatgaaacgtccacccacaagctgatctccgagaactacctgggaaaaagcaccctctggctggacacctacggcaagagcaccgggcattccggcagctactccaccaacaaccagatcacgggccgggagctgatgacacccgatgaggtccgtatgctggacaacaacctggccctgctttttatccgtggcgaagcgccgctgatggatgaaaagtatgaccttttgaaacatcccaacatcaagtacaccaccgatggcggcgcacccgtctattcccatggcggcactgaaaacgccgtggcggatatggtcattggccgcctcacccccggcgaccttgccaatatccaggaaccggaaaccctttacgaacttctgtccgatgaggacatggagaatatctttcaattcaaggaggaaaagcaaaatgaagctgtttcataaggaaagcaagcagaagaaagaaacccgcagcctgcccatgggcaaaaagagccggagcgcctttgctgtttatgcggccctggtgctcatgctgtgctgctgcaccactacggcctttgctgccagcgacccgttgactgttatcaacaacctcagtgatttcatcttcggcctgattcgcgccattggtatgattctgctgggcttcggcgtcgtgcagatcggcctttctctgaaaagccatgaccccagccagcgagccaatggttttctcaccctggccggcggcgttgtgattacgtttgcgaaggagattttgaccctgattaccggctgattctaataacggcagtgtggggggcaggcccgtggtggcctgccccttaccgttgccggaaaggaggttgttgaatgtccgataactgggttgttcaaaatttgcaaaatgccctcgacacctggaacaagtacctgtccgagatttggcagctcattacgcaatcaccggaacagtttaagggcggctccatctggggcgtcattgtcaatatccacgacgcggtgcgggccattggccttgcgcttttggtgctgttctttgttgtgggcgttatgcgcacctgcggcagctttgccgaggtaaagaaaccggagcacgccttaaagctgttcatccggtttgccattgccaagggcgtcgtgacctatgggctggagctgatgatggccctctttaatatcgtccagggccttgtctccaccattatgaacgcggcgggctttggagctgcgcagcagacggttcttccccaggagatcgtcacggcggtggaaagctgcggattttttgagagtatccctttgtgggcggtgacgctcatcggcgggctgttcatcacagtgctttccttcatcatgattctgacagtgtatagccggatgttcaaattatatagtgcgcccggaagggctgcggcataagccaaagcagctcgcgggcaatttgggattctgccagtagcgcggcagtaggagaaggtattccgaagggaggtgcaaattaccctatcaccaaccgatttatccggcggggaaacccaatggggagtgtagcatatcggcaacgtcgtaagttgggaaactatcgaaccactactgaacggcaaggtgaaacgttgtgaatgaggaataaagctggattgcttgaagggcagtccaaggcggcatacttgagccggcggcgcaggatagttgtattcgccgcatgccgtggcaaccggtgacaggtacacgccgattgcgaaatacccacggcagccaaccgcagtaagcggataacggacgaaaacccattccgacatcacaacacgctgtcccaaactgcctaaccggggattgcctaacccggaacgcccttataggctatggctttcagagcctgaaaattcggtatggcaacggagccgccgtagtagtctgagcaagggaaagccttgcacatggcgaagggcggcaggatatcaaccaaactatcaatggaaaggtgcgtgaggcactatgagaagtccaaagaacgttttggaaagtctgacatcaaaagcagcaaacaaagattaccactatcaaaggctctatcgaaacttgtacaatcctgcattttttctgctggcgtatgagcgtatccaagcaaaacccggcaacatgacagccggaagcgatgggaaaacaatcgatggcatgagtatgaagcgaattgaagccctcattcaaaaactgaaggagttcagttatcagccaaaacctgccagaagaacgtatatcccaaaagcaaacggcaaaacacgccctcttggtatcccgtcttttgacgacaagctggtgcaagaggtggtgcgcatgatactggaaagcatttatgaacccacctttcacgttacttcccatggattccgcccaaagcggagctgtcatacagccctgcaacatatcaagcggaattacacgggggtcaaatggtttgttgagggtgatatcaaaggatgttttgacaacgttgaccatcatgtgctggtacagatactgcgcaggcgcattgcggatgagcattttatcggcctgatttggaaattcctgaaagcaggatatatggaaaattgggtgtactacaacacctattccggcaccccgcaagggtcgctgattagcccaattctggcgaatatctacctcaatgaactggatgtgttcatggcggagtattccaaatcctttaaccgcggtacaaaacggaaaatcaacccggcctacaaaaagccgttggatgtccggcgcggaaaacaggaatggctgaaacgcaatgaagcaaaaatcagtgaggaaaaacgccgggaggtcatggcgcagatacaggaacttaatagccaactgcgctctatcccttacagcgaccccatggatacggaatacagacgggttgtttatgtccgttacgctgatgatttcctgattggtgtaattgggagtaaagaggatgcgaggcaggtcaaatccgatgtgggagcgttcatcaaggaacatcttcacttggagatgtccccggaaaaaacgctcattacccacggaagtgactttgcccacttcctcggatatctgattacagtcagccgggaacaaaacagtacccggacaaaaacgggttttacacgccgaacctatgtaggaaaagtcaagctgtatgtgcccaaagagaaatggctgaaccgccttctctcctatggcgcgctgaaaatcagctatgacaaaacccatgggaacaaagaggtatgggaaccggtacggcgtccggggttgatacgcctggatgatattgagattctgaaccagtacaatgcagaagtgcggggcatgtacaactattttcggctggcaaacaatgcaacggtgttgaacgccttcctctatgtgatgaagttcagcatgtacaagaccttcgccggaaaatatcggacgagcatgcggaaaattattcgcaaatactgccgcaacggggattttaccgtatcgtattcaacgaaaaacgggacaaaatccgtggtgttttacaatcagggtatgcgccataacgacaaagtcgttgtaacggaaaacccggacattattggcagggctaacgagaaccgccgctatacccggctgacagaccggttgcaaggccatatctgcgagttctgcggagccgaaacagagaatattgaaatccatcatgtccgaaaactgaaagatttaagtggtaaggcagaatgggaacgccaaatgattgcgcgtaaacgcaagacaatggcgctgtgccactcctgccatgtaaagctgcacaatggaaagttagactgatatctggaaagccggatacatcgagaggtgtacgtccggtttggaggggagcgtttggaaacctaccgcagcaatgcggcaaggcgccgggcgcttaccctactatacacggccatcgcgccggtgcccctctccacctttggcggggaacccagccagaacgtaggcaagagcttcatcaaaagctatgccgctgtctgcctggaaggtgccatcattgtgctggcctgcattatcttttccctatttgcggcgtccccgcctgccattgaccccaacgcggcggcagtcacgcaggtgtggagctatatcggggagctggtatttaatatgttagttttagtgggggcagtaaagatggctgaccgcgtggtgcgcgagatgatgggcctgtaaaaaaggaggaaaacaaatgcgttatcaaacctatgtgctgcacttgattgatggaaccgccatcccaatggtggaggattacgacctgcccgctgaaaagggaattgtgggccatttctccaaagcggctccagacgagatttttaccgtgggcgatcggctgctgggctttgcctatattcccaagagcagcattgtttacctggaaaccggcgatgtgattgtgaggtgatattttggaagtcaagatcaaccgggaaatccgcaactacaccgaatccatgtttttcggtttgagtatgcggcagttcatcttttctgttctcgcctgcggcgtggccgtgggcctttattttatcctgcgcccctactttggggtggaaaccctgtcctggatgtgcattttgggggcagccccctttgccatgctggggttcatcacctaccacggcatgacggcggaacaattcatctgggcgtggctgcgctcggaaatgctggagccgaaggagtttaagttcgaggacagcaattactactatgcggctctgaaagataccattgaggagctgcaaaccgggcggctcggcaagaagcgccggcaggaaccaaaacattttagcaaacggaaggaggccaagcatgattaagaccatcaaaaccatgtccaagcaggaaaaggaacgctacactgtcccccggaaggtgcaggatgtgatccccgtccgccgtatctggccggacggtatttttcttgtggggaacaagttctccaaaacctataaattcagcgacatcaactatctggtggccagccgcgaggacaaggaatccatgttcctcacctattcggagctgctcaattccctggattccggcgcggtgacgaaaatcaccatcaacaaccgccgtatgaatcaggccagctttgaaacgtccatcctcatgcccatgcagggggatttccgggatgagtaccggggggaatataaccaaatgctgctggataaagccaccggagccaacggcattatgcaggaaaagtatatcaccatttccgtggtgaagaaggacattgaggaggcccgcgcctatttttctcgtgtgggagccgacctgatttcccactttgcggcccttggctccaagtgcgtggagctggacgccaccgagcgcctgcgtatcctgcacgacttctaccgccagggcgaggaatccgagtttgtgttcaatgcccgtgagatgatgaagcggggccacagcttcaaggactatatctgcccggacggaatcgagaaaaacagcgactatctgaagctgggcgataagttctgccgggtgctgttcctcaaagactacgcctcttatattaaggataacatggtgacggagctgacggatttcaaccgcaatctgatgttctccatcgatattgtgccggttcccacggatgaagctgtgcgtgaggtagaaaaccgccttctgggtgtggaaaccaacatcaccaactggcagcgccgccagaatgccaacaacaatttcagcgccgtagttccctatgatatggagcttcagcggaaagagagcaaggagtttttggacgatctcaccacccgagaccagcggatgatgttcgcggtaatgaccctggccatcaccgccgacaccaaggagcagcttgacagcgacaccgaagccgtactctccgtggctcgaaagcacatgtgccagcttgcggtactcaagttccagcagctcgatggcctgaacacggccctgcctattggggcgcggaaaatcaacgcctttcgtaccctcaccaccgaaagtttagcggtgttcattcccttcaaggtgcaggagatccaggataaaggcggcatttattttggagagaacgccatttcccacaatctcatcatgtgtaacaaggcgaacctcttgaaccagtcggccttcctgctgggcgtacccggcgcaggcaagtctttcagcgccaaagagctgatcgcgttccttatgctccacccggattatgccaatgacgacatcctgatctgtgacccggagggagaatttggcgcattggtcaaagccctgggccgagaaaaagcgacggtggcccacctggtggcaggcggcaaagaccgcttaaacgccatgtatatggtagagggctacggtgagcaaaaccccatcgtggaaaagagccaatttgttatgtccctcatcgagcagatcgacaagcgcggcgtggggccgcagcacaaatccatcatcgaccgctgcaccgccctggtgtacccggaggcggagaagatcgggcgagttgccaccctctgtgacctgcggaataagctgctggagcagccggaggataaggccaaagagatcgccctttccctggagctttacaccaccggctccctggacatctttggtcgggaaagcacagtggatttgaacaagccctatgtggtgttcgacatccacggcctgggcgagcagctaaagcctgccggttccctggttatcaccgataccatcctgaaccgcgtcaccctcaactggaaacggggcaagcgtacccatgtgttcatcgatgagtttcatgtgatgtttgaaaatgagcaaagcggcattttctttaattccgcatggaggcagtttagaaagcgcggcgcttatcccacagccatcacgcagaatgtggagtaccttttggattccgtccaggccagtaccatgctctccaactcggagtttattgtcatgctgaatcaggcggcgtccgaccgggcaaagctggcgaagctcctcaatatctccaatgaacagatgagctacgtcaccaacgcagacgcgggctgcggcctcatccggtatggcagcgccctggtgcctttcatcaaccggttcccccgtgacaccaagctctatgctttgatgaccaccaagcccggtgaaggtgtattcggcggcgaggaggtgccggcatgagcaatatccgctttgcgtccccggagcaccgggatttctttttagatatgatgagcgaggcgaggcggaacgactgttaccaccgggcctttttctatgtgatggggattgccccggaaacgcgggcaaacatccgccagatgtttgatttcaagcaggattgcattgaaccggatggtatgcgcggcggctggcagaccagcggcaccgtccgggtgtgccgccttgctttcaatctctggaacggctacaccgacccggagcacagcaacgcctattccccggaggatttgttctgctgcgagtttgcaccttactttatggagggcgtgaaaatccgttacccggaatactgccgggagctgccccctgcgagaaagcaagcggaaccggcgcgatgatacttttgagaatggaggaatgaacaatggctgaaccagctcttgcgctgcgggaccatccgcagatcatagacctgatttccgttttggagcagaacgggcttcaaaagcagaaagaagaagtgcaggccctggtgggctatatcgacggtatggaagaaaagctgtcgcagatgatggacgaaatgaaggaaatgcgcctggaggtgggcaagctccacgacaagggaatccgcgcccggtgctctcagcttgtagacactgtggagggtaaagtccgccagaccaaagtgatggtttccacggcaaaagaaaacctcatttcatctgcaaagcagatggtgcagactttccgggagaaagggcgctctgccctgtaccatgcggcccaggccctgcgtatcccctcggttctttcccggatgggacggggctttgcccatgcggaaaaaagcatggggcagcttgccgtgaggctggacgctatgcgagaggaactacaccaggcgggcggccacatcaaaaacgccgggcttgcccttgcgggaaaggagccccagaaaagcaaggaattatctgcggataagggtgtgcttgccaagctgcggagctttgtgctgtactgcggcaaggcattttctgagatggatcgtgacacggctctcactgtggagcgaatcaatggagggcgctcatcggtgaaaaccgagctgcaggggctgaaatcggcccaggccgggcagcgccgccaagcggccagtaaagaacaggcacgataagtacaggagggtgaaaatatgagtgacaaagttaaaaacagactgatgatcgctggggcggccctttgtgccgcccttttccttttctctggggctatgctctgccgggaatacctggaccagaagcaaagcgccgaagcctttgacgaggtggccgggctggtcaaggaagatgtggagctgcccacgctggagctggccgacgactcagcccaggagccggaggaactcacggcctttgaaaagtatgcggatgtgtacgcccagaacagcgacctggtgggctggatttccattcccggcacccggattgattaccccgtcatgcagaccaaagataaccccaacttctatctgaagcacgcttttgataagtcgtacagcagctatggggtgccatatatgcaggaaaactgcgacattggcatttccgacaatctggtgctgtacggccatcacatgaacaacggcagtatgttctccgacctgtgcaagtacgagagcgaggatttctaccaggaacacaagaccatccgttttgatactctggacagctttggcgaatatgaagtggttgccgcctttaagacggtggcctactcggaatctggctttaagtattaccatttcgtcaatgcggaaagcgaagccgcttttgatgagtatatcgaggggtgcaaggaactttccttatatgataccggcgtgagtgccgaatacggcgaccagctcatcaccctttccacctgcgagtattcccggactaacgggcggatggtgattgtggccaagctgctggaggaataagggcggccccgccctgggaaggaggtgaagcccatgggcaagggcattaaaacaagagtttctgagaaaaaaggcattaaagcgattgataaagcggcggttgcttctgaacgaatgaaggaggcatatatccgcaccaaggataaggccgaccacagcctgtatgcggaggaaagctcccccgatgaatatgcgtccgaccgcctttccgctggggtggataacgtcacccatggagcggtccaccagtttgacaaacagggccgcaagggggttcagacgactaaggagaacatctccaaggtcaaggagaaaatccaaaagcggaaagccgcagccgaacagccgaaaaaacaagcggagaaacaggcggctcagcaggctgggcagcccaccacacgctggagcgggcgtcaggcggcggatacggtttccgagccggccaaggcggtccgtcaggagcgcggggccatcaagaccctggaccgcggcaagaaaggcattaagacagtggacaggggccgaaaaaccatcaagcaggcttcttccacagccaaggggacgataaaaaccaccagcaaatccatcaaaacggcggaaaagactgccaaggccagtattaagaccagccagcaggcggccaaagctgcccagcgcactgcccaggccacggcgcgggcggccagggctgcggctcatgccgcccgcatagcggcccggactgcggtagttgcggcaaaggcggcagttaaggctacggttgcggcggtgaaagccattatagccgcaaccaaggctctgatcgcggccatcgccgctggcggttggattgccgtgctggtgattattgtgatctgcctcatcggtatgattatcggctcctgctttggcattttcttttccggcgaggattccggcaccgggcagaccatgcagactgccgtgcaggagatcaatacggattaccaggaaaacctggacgaaatcaaggcgtcccacagccatgatgtgctggagatgtccggttcccgcgctgtgtggaaagaggttctggcggtttacgctgtcaaaaccaccaccgacccggataacgcccaggaagtggccaccatggacgatgagaagctgcagctgcttaaggacatcttctggcagatgaatgaggtttcttccagcacgtccacccagacggagacggtgattgaaacatccgatgatggtaacggcaatatcgtggaaacggaagtaaccgtcacccgcacctatctgtatatcaccgtcagccataagactgccgaggagatggccgaccagttcggttttaacgaggaccagcgggaacagatggcggaacttttggccgatgagaacaattccctttggtcccaggtgctctacggcattaccggaggggatggcgagatcgtcacggtggcgctctcccaggtgggcaatgtcggcggcgaaccgtactggagctggtacggttttggcagccgtgtggaatggtgcgcctgctttgtaagctggtgcgccaatgagtgcggttatatcgaagccggcgtgatcccgaagtttgcggcctgcgcgtcccagggtgttccctggttccaggagcgcgggctgtggcaggacaacagctatgagccgcgccccggtgacattatcttctttgactgggacgatggaggccaagacgggcaatccgaccatgtgggcattgtggagaaagtcgagaatggccgtgtctacaccgtagaaggcaactccggcgattctgtgcgccagaacagctaccctattgggtactatgagatttatgggtacggtaccccggcgtattaacttcctcaaaaagaagaacccagccgcgtagtgcggctgggtacatagagatgcttctgaaattcgttcaaagcatgacaaataaaagaacttccaaataaggcatatctgtggtataatatttatatataccaatgagggggcgcgactatggaacttcgagttcttcgctattatttagctgttgtgcgggaagaaaacattacacgtgcagcagagattttacatatcactcagcctactcttagccgtcagatggcagaactggaggatgagttgaacacaaaattgtttgagcggacgaacagaaaaatatccctgacagaagccggtatgttgctgcgccggcgggctgaggaactggtctctctggctgacaaaacagagcaggagttcaaaagcggtgctgaagaattgatgggtctcatttctattggcagcggtgtgactgcggcgacttccgaagctttgccggagttgttgcaggcctatacggaaaaatatccacaggttcgtttcgagcttcgtaccggtatggcggctgccattaaagatcagttggataaggggctcctggacatcggtatcttgatggaacctgttgaagtggagaagtatgattttatccgtctgcctcaaaaagatgtctggggtcttctcatgccggaagacgatgccttggcagagaaagcgttcatcacacccacagatatacaatctctgcggctgatcgtgaactggcggattactgagcgggaagcgaaagcctggtttggcggcgatacgaatcatctgaatgtgttttgcacctatgatatgattgacaacgcggctctgctggtgaagcgccaccttggatatgcgtttgtgattgagggggctgtaaaacagttttcgggtttgacattccgccccctctctccggaaatcagcaacacctctgtattggtctggaaaaaataccagcccgctaatcaagctgtacaaaaattcattgaattggctcgaaatgcttacagagcatgatagcaagaggaatcaagtgctttacaaatcttaataccatactccagaagaaattcgggatttcttacagaccgcagaggaaatcgccagcatggacagcgccccggaacgggtggcgatggcgtttatctgcaagcggctcaagctgaactatgggaaactgtcagaaaaaagaaagtggttaaaaagaatggcacaaaagtcggacttgctgaaaaatccaaagccacagcgaggacggaaataggtgaaaaaaatagggagtaagcaaaatgttgtttgaaaaaattgatagggatacctgggctcgtaaggaatattttgaacactatttttcaaatgttccctgtacttacagcatgaccgtcaaattagatattacaaaaataagggagcgacagattaagctatatccggctatgctttattatcttaccaccattgtgaatcgtcattctgaatttagaacctctttcaacgagaatgatgaattgggtatatacagtgaaatgataccttgctatacagtgtttcacaagcatactgaaacattttctaacctctggactgtttatacatcaaatattgaagaatttttagctgaatacgaaaatgatattttacaatatgggaatcaaaaaggaatgatggcaaaaccaaatgttccaagcaacaacttcagtgtgtcaatgataccgtgggcaacctttgaaggatttaacctgaacttacaaaaaggatatgactatttgaaacctattttcacaatgggaagatactatcaaaaggctggacggactctcattcctttggcaattcaagttcaccatgccgtatgtgatggatttcatgtctgccgttttatagatgaattgcaagaattgataaatagtgaatattaaaacagagaacaggggcctgtagaagtagaccataaagcaatatattgtctaagaagccctattatgcggcaaaaaaggagaccttgcacggcttcctttttgccgtttttcaggaattttgaaatgctttcaaagcatggccgccaaagaaaccaagtattttacaaatgcaagaccgtctcttataatgtgagtgtagccgaaagcagaacgctttccaggcacactcacatttttgtatatagaagggaggaaagcgtatgaccattgagcaggcaagtgaacgctttgctgtaccgttggataaactgcagttttacgaaaagcaggggttatttgactgccataagcagccggacggcatggtcgattacaatgatgatctgatggactatctgggaattatcaatgtgctgatggatgctggtgccgaagtggacacgctgcgaagtttcatggagcggctcatgcaaagcaggatcacgaaggatgaaaagctccgctatctgcgcagtcagcggcaaaagcttctggagaatatccactccaagcagaaattgctggatcagctggattacatcatttttgacgcaaacaggccttccagctcggaacaataacacaaagaaaggatgaatgtaaaatgaaaaaagatttaggctccgtactggcgctctatccgacgcctcttgtagtagtaggtactatggtaaatggtaaacccaactgggtgttggtgggtcatgtaggaatcatgggacacgaccatatcatggtcagtctggcaaagccccattatacaaatcagggcatccgcgagagtaaggctctctcggtcaatattgtggacgaagaaatgctccagaaggctgattatgtgggctgtgtcagcggcagcaaaacagataaatcccaggtgtttgagtataccatcgggcagaatggcgctccgcagatcagcgaagcgaagctgactatggagtgttcggtggaggatatctacgagacaaaaggatttgacaattttatcctgaccatcgatcacacctatgccgaggaaagtatcctgaatgacgccgggaaaatcaactatgatgttttcaaaccgattttgtttgagatgcccggctacacctacctgaaaaccggggaaaccgcagccaagtgcatgactcttggcagagagaacaaataaaaaacgcaggtgtctgcgaaacgggaaaccgaaacccgcaggagcctgccaaacgaaaggagatcacaaaatgaaaaaaattctttcccttgcattgacactcgcaatggtatttacccttgccgcctgtggaaacagcggctccacggagagcagttctcctgattccgaggaaagcagcacttcttctgaagtcgtttcacagactgaagaaacctctgctccagaagactcctctgttccaactgagggagaatcccaggccgaagcatcttccgagccggaggatgaggcggggtccaattccctgattgtatatttctcctggtccggcaatacggagtcggttgcaaatgagatccaggcgcagacaggcgcagatatttttgaaattatcccggctgaaccttacacggacgattacgatactcttctggatattgcgcaggaggaacaggccagtgatgcccgcccggcgatcgcggaaaccgtggagaattttgagcagtacgacaccgtctatttcggttttcccaactggtggggagatatgccgatgatcctttacaccttcctggatgagtacgatttctccggcaagaccatcgccccctttgtcacctctggcggcagcggtttttccggttcaatcgggacgattgaaagtatggaaccggaggctaccgtgaccgagggcctttccctgggaagctcacaggctgcggaacctgccgctgccgtgacggaatggctggccgcaatcggccttgaccagtaagggggaggcaagatgaaacgaataacggcacttctgttgtccctattaatggcggtgtcgctggcggcctgttcgcaggaatccgtttcacaaacagaatcggagaatccgccggcggaaagcggttctgtttcctctgagacatctcccacttctgcactggtatcggagccgacagaaggcttcgtcctcatcgagggcggcacttttcagatgggcagcccggattcagagccatggcgcagtgcggatgaaacccagcacaccgtcacggtcagcgatttctatatcagtccatacgagctgacacaggctgagtatgaggcagtgatgggagaaaaccccagcaatttctccggagaagatttgccggtagaaaatgtgtcatggctggatgccgtcgcttactgcaacgcccgcagtgaacaggaaaacctgacgccggcgtataccatcgatggaacaaatgtcacctggaaccgagaagcggacggatatcgcctccccacagaggcggaatgggaatacgcctgccgcgcagggacggaaacgcccttcaatacggaaaactctcccagcgccgaggaggtcaactattatggacactacccttatgaaattgaagggaattacttttcccagggcaatctggaaacacaacccggtatctatcgggagactacattagcggtgggaagctttgaacccaatgcttttggcctttacgatatgcatggcaatgtcagcgaatgggtctgggattactacggcgcatatcccgcagaagaacagaccgatcccaccgggccagagaccggcgcgctgcgggtctaccgtgggggtggctggaacgattttgccaaaaatatgcgctgtgcgtaccgggcaactctggagccagagcatatgagcttcaatattggtatccggctggtgagaaacgccgtagcgggctccggtacagtgtccggcgctgcagtggaaaatgcctccgatggtgacggaaacgtcttgatcgcctatttctcctggggtggaaatacccaggggatcgcagaagagatccagcggcagaccggggcagatctgttcgagattaccatggtccatccctattcgaatgactacaacacagtattggacgaagcccagcgggatcagaacgaacaggctcggccggagcttgccggtcatgtggagaatatggagcaatacgacaccattcttttgggttatcccaactggtgggcgtccatccccatgccggtggcttccttcctggaggaatacgatttttccggcaagaccgtcatcccgttttgcagtcacggtggcggccggttcgggcaaagcctgacggccattgcgaaacttgtgccggatgccgccatgggagaggcgctggatatccactattctggcggcagcagtatgccggatgatgtgagcagctggctggcggcaaacggactatcagactgaatcattataaaatcaaatcattacaaaaaggagacttttattatggaaaacggaaagaaattccctaaaattgcactcggtacctggtcctggggcgttggcgctgtaggcggagatcaggttttcggcaacaagctgggagaaaaggagctgaagccggtgttcgacgccgctatggatgcgggcctgaacctctgggacaccgctgtggtatacggcatgggcgcatcggaggacattctgggcgcgtttgccagaacctgtaagcgtgaggacattctgctgtccaccaaatttactcccgatattgccagtgaggggaagagtccggtggaggaaatgtgtgatagcagtctgaagcgcctgggcactgattatatcgacatctactggattcacaatccgggcaatgtagagaagtggactcccggcctgattcctctgatgaagagcggcaaggttcgccgggtgggcgtttccaaccacaatctggaacagatcaagcgggcagaagaaatcctctctgccgagggcgtccatattacggcaatccagaatcactacagcctgctgtaccggtcttctgaggatgcgggcattctggactactgcaaggagcatgggatggagttctttgcctatatgacgctggaacagggcgcgctgtcaggtaagtatgacacccagcatccgcttccggagggaagcatgcgtgctgcgacctacaatccccagcttgctcagatcgaaaagctcactgttgtgacaaagaagatcgcagcggctcatggcgtttcccctgcacagattcctgttgcctgggcgattgcaaagggtactactccaattctgggtgtgaccagccccgaacaggtagccgacgcagtaaaggcagccagtgtagtcctgaccgctgaggaaatggcggaactggagcagacagcggcacagactggagtggatacccgcggttcctgggaaaagcctatgatctgattccacaagggaattatttcaggccggcgtgcgctgccgcattgtcggcatcgtgcgccgttttttctatacagaaagcaagaaagatttaaggagggaagaaagatgcctgttattacgtttgaagcggcaaagttaaataaagaacagaaaaaagagctggtgaagggatttaccgaagtggcagctaaagtgacagggctgccggaagccggattctatgtgttcctgaaggaaaacagcctggagaatgtaggcgttggcggccagctcatctccgacaggaatgaggacgcatgatgaaagaggaaggaactaagatggcaaaacaaacagctgtgatcatcggcgccggtcctgggctgggatacagtcttgcggagacctttggaagcaaaggatttcgtgttgtactgcttgcccggaacgagcaacggttgaaaaagtttcaaaaggatttggaagcaaacggcgttgaagcattcatttgtcctgcggatgtaactgaccagaacagtctggaatcttccttcagagccattcagaaggaagttggtacgccggatgtgatgatttataacgtgggaattaccaccgcagatgtggatacacatattgacgcagatgttctgattcaacgctatcaggtagatgtggcgggtgcttatcgctgtatccaaatggttgataccgaagaattttcccaaaagaatggcactgttctggtaacaggcggagggctggcagtgcatccgcattttgactatcttccgctttccatggacaaggcggcgctgagggcgatggtctacgccatgcatcctgttctgaaagaaaaggggatttttcttggcatagtcactattgtgggcggcatcaaaccaggaactgaattctcaccggaaaagattgcggaaacatactggaaaatgtaccaggagcgcagccaatgtgaggtgcgttatgaaaaaacaaaggagggttctttatgagtgaaaaaattgtacagactgcaggcagagtacagcttggagattttgccccggagtttgctcactacaatgatgatgtactgttcggggagaattggaacaatcaggatatcgacttgaaaacacgctgcattgtgaccatggtggcactgatgtcttccggcatcacagattcgtccctcgtttatcatcttgaaaacgctaaagcgcacggcgtgaccagggcggaagctgctgcgatcatcacgcacgccgccttttatgcaggctggcctaagggctgggcagttttccgtctggcaaaggatgtctggaaggatgacgacacggcgggagaagcacacggcggtatgttcggtcaggggcagcccaacgatgcctatgcgcagtattttgtgggacagagttatcttaatcccgttgcgggccagagcggagtcaatattgccaatgtaacttttgagccgggatgccgcaacaactggcatatccataaggctgaaaagggcggcggacagctcctgctctgtacggaaggcagaggatggtatcaggaatggggcaaggaagcgcaggagcttcatcccggtgacgcagtggagattcccgcaggcgtcaaacactggcatggcgcagcaaaggatagctggttctcccatctggcagtggaaattcccggcgaaggaacttctaacgaatggctggaagctgtgacggatgcggactacgatactttgaaataaatctggataaatatggaggtataaaacatgagcaagacattggtagcttatttttcggcaagcggtgtgaccgcaagactggcaaacacattggcaacagctgttggcggcgatctgtatgagatcgaacccgccaaaccctataccagtgctgatctgaactggaataacaacaagagccgcagcagtgtggaaatgaacgatcctgcttcccgcccggccattgctgcaccggtggcagatatggagcagtatgacaccatttttgtgggcttccccatttggtggtacgaagcgcctcgcattgtacagaccttcctggaaagctacgacctttccggtaagacgattgtccccttctgcacttccggcggaagcggcctgggcaagaccccggcgatcctgcaaaagagctgccccgctgcaaggatggtatcgggaaagagactgagcggcagcgcctcagccagcgaactgtccgcgtgggtgaaaagcctcggtctgtaaggaggtaccggcatgaacattttggtgattgaaagcagtccccataagcacggttcttctaacctgttagcagaagaatttatccggggtgcaaaagagtcgggacatgatgtatcggtatttgatgccggtcacgcaagccttcatccctgcctgggatgcgaagcctgtgggatgtccggaccctgtgtgcagaaggacgatatggcaaagttgcgggaaatgctgcttgcagcagatatggcagtcttcgtgactcccctttattatttcggtttttccacccagctgaagatggtgatcgaccgcttttacagtttcaacggacaattaacagccagggggctgaaaaccgccctgattgcggcggcatgggacagcaacagctggactatgaccgatctgaaagcccattatgaaaccctttgccggtatctgaactttgaaaatatgggcgagatcctggggacaggctgcggcactgtttccatgacaaaacgaacgaaatttccgaaggaggcatacgagttcggaaaaaggataggaggatgatgctatgaatcggtctgccatcgtcaaaattgtggtagatgcgttgatgacgctgctcctgctttttttgatggggtatcagctttggggcgaatccgcccacgagtgggtcggagccggaatgctcgttttgttccttgcccatcacatcttaaaccgaggctggtataaaagcctatttaaaggcagatatacgcccatgcgggtattccaggttctggtggatatgctgcttctggtgaccatggcagcgcagatgtacagcggcattgtcatgtcgcgtcatgtattcgcatttttacccgttgatggcggaatggcgctggccagaaggctgcatatcctgggcgcctactggggctttatcctgatgagcgttcatctggggatgcactggaatatgtttttgggtatggcaaggaaaagaaccggcaaggcggttccttcaaaacttcgcagttcgctcctgttcctgattggtttgttgattgcagcttatggtgcttttgtatttgtgggccgggatttttcgacttatctgttcctgcgatccgaattcgtttttctggactatgaggaaccggtctggtcgttctatcttgactacctctgcctgatggggctttgggcgttccttgctcactatctctccaagggtttgagaaaacttggcggaaagaagaaggctgccaaaagaaaggagcgcgtatgaaaaaagcagcaagtctggcaatggcggttctgctggccatcttccttgtcgcctgccagtcagaaaatccccatgaggaattgagttcctccacgcccccgccttcgcagaaccaggacagcgaaagccgcgaacctgtaacggagtcatcggacatctccgagagcgcatcgtctgaggaaacggcaaatgaggaatctgttcagcggcagatccgaatgacagccgaaggaaaaacctatacgatcactttgtatgagaccccggcagccaatgcgctgtatgaaatgttgcccctggaactgacctttgaggattacaacggtgtggagaaaatcgcctatctgcgggaagaacaacagcttcccacagaaggcgaaccagacggctatgacccttcggctggtgacctctgcttgtatgccccttggggtaacctttctctattctaccaggagtttgggtattcaagcggcctgatttctttaggcaggctggaaacaggagtcgatgagatttcggctttttcggacggggttacggtcactttggaacacatggaataaaaaaacatcatccgcgcagagcgcagaaaggagtatacaatgcgcaagaaagttatttctgtctttatgatggctgctttcctcgtcatggcttgtctggctggctgcgggcaagcaggagaaacgcaggaagcaagcgattcgcttacgccgagcagccagacggaatccacgccgtccacaacggagaatgaaacagaggatggtcccgctcccatcgaagaaaacacccccgcccccggcgaagatccggtagccgatggaacggctcccgtggtctatatgactaccgatatcagttcagatgggctgatggctgtttatgaagcgctgggagcttcgccctccggcaatatagcggtaaaactttctaccggtgaaccgggcagcaactatctgcgtacggatttgatcggaaatctggttcaatccttaaacgctacgattgtggaatgcaataccgcttacgggggatcacgttcgaacactgccatgcactatcaggtggcagaagatcatggttataccgccatagctgatgtggacattatggacgaggaaggttccatgacattgcctgtggagggcggcgataatctgacagaaaattatgtgggttctcactttgccgactatgattattatgtggtgctctctcatttcaaaggtcatgctatggcaggatatggcggggccattaaaaacatctctatcggtattgcctcttccgagggtaaatcccatattcattccggcggtaccggcggcagtatgtggggcggcgatcaggatgctttcctggagtccatggccgaggcgggcaagtccgtggtggactacctggacgggaatatcctctacatcaacgtaatgaaccggctgagtgtggactgcgattgtgatggcaaccctgccgagccggatatgcacgatatcggtatcctggcttctttcgatccggtagccgtggaccaggcgtgtgtggatctggtctatgccgccgaggacggaggctcccttgtcaaccgtattgaatcccggaatggactacacacgctggagcaagcggagaagatcggccttggaagccgagagtatcagctggtcgccattgacgaatgacccgaagggagcgggcgttatggaacaggctgtttttaccacattgtgcatggtttctgatccgaacggccgtgttctggtgcaggaacgagttggcacagcctgggacggaatcgcctttccgggcggccatgtagagccgggagaatcttttgtggaatccgtgatccgtgaggttttggaagaaaccgggtatcagataaaggctcctgttctttgcgggatcaagcaattcaccatggagaacggcggacggtatgtgattttactttttaagagcaaccagtttgaaggcagcctgcgtccttcatcggaaggcaatgtgttttggctggagcgaacgaagctgaaggagtatgcactggcgcgggacatggatgcaacgatgaatttgtttgattgcgaggaactcagtgagttttattatgcgccggacggctcgtgccggctgttatagaagggaggagatttatgcttgagatcgtaaaacgtgagggcacctatctttggttttatttcagcgtccagcttgagcagctccttccttattgggtgttgggcatgatgctgggttctgccgtctctgtctttctcaaggatcggattcatgacaccttccgttcgttgggcgagaaaaagctgggcgcactgggaattgtagccgccagcgttctcggcattgcttcgccgctgtgtatgtacggaaccattcctattgctgcttccttttccaaaagcggcatgaaggacgattggctggcggcatttatgatgtcctcgattctgctgaatcctcaactgatcctgtacagcgccgcgctggggaccaccgcccttgctgtgcggatcgtgacctgctttttatgcggcgtcactgccggggtgctggtacggatcttctttcgccggaaatcattttttaattttgacggtttcgaaccacccaaaagccgggatacagaccccaatcccctggtgcgatacctgaaaaatctgggccgaaatatcaaggcgacgggactttattttctcatcggtattcttttgtcggcactgtttcagcgatatgtgccctccgatgtgatgacggggctgttcggtgggaacgaagcctggggcgttctgatggcggccaccataggcgttcctctctatgcctgtggtggcggcacaattcccctgttgcagggctggctttgggatggtatgagcatgggcagtgcagcctcgtttatgcttaccggtccggccaccaaaatcaccaacctgggcgcgttgaagatcatattggggctgcgccattttctgctgtatctcgcttatgtaatgctgttctctctggcagcgggattagctgtgaacctgattgtgtgatagataaaatagaaaaggagcttttgcaaatgaatacaagcgcaacaattatggaaaagccgcggctttccgtgaaagtacagacattggcgaccttggctgccattgcaggggcagtagtagtgccgcaattcttccatctcctgggagcggccagcgggctgggtactgccttgggcgaaacttttctgccgatgcacctgccgatcattctggttggtcttttggccggaccttatgcgggagcaatttccgggatactcggcccggttgcaagttttgccctttccgggatgcctggtttagcgatgctgccctttatgatgctggaactgggtacatacggactggctgcaggtctgctccgcaatagaaaactgccgaccgtcctgaaggtcgttatggcgcagattgcaggcagagctgtgcgagcggccgcaattttagtctccgtgtacgctcttggaaatgagagcgtcgcagttgcttccatttggacaagtataggtgcgggtctgatcgggctgtgcctgcaatgggcgttgctgccgctgattgtctatcgggttgagggaatgaaaaaggatgaacaatgacattgtgaccgcctcccaatacttgaaagataaaggatacacctgtgttttctgccgggaggacacgatgtattccagtacagaacgcggcgtcaaaccgctgttggattttatcgagaacggacccaatctcagagggttcagcgcggcggacaagattgtgggaaaagcggcggcactgctgtatgtcctgcttggtgtgaaagaagtctatgcaccggtgatgagcgaaacagctctctacacattagcccacaatggaatccttccgctgtgcgactgctctgtaaaatcgatccgcaaccgcagcggcacaggagcttgtccgatggaagaaaccgttgtggacattgatgaaccccggcaagcggtgatcgcaatacaaaacaaactgaacattctgaaagaaagaagggacgaaccatgaaaagaatccttgcgttgattttggctcttacactatctctttccctggcagcctgcggcaatacgccgtccaccgaagaagaagcaccctccagttcttcgcaggtttccacatcgccggagcagaccgaaccttccagcacgccggagagtgatgtaaccgaaaacacagaaccggagagtacgattcctgcggaatcttcagagccggacaccaacatcctggttgcctatttttcctgggctgataatgcgattttagcggacgatgtggatgccgttgcatcccccagcgtgattgcaccgggcaatgtacagcagctggctggctgggtacagcagcagacgggcggcgatctgttttccattcgcgtgaccgatccctatccaagcgactgggatgactgcctggcgcgggccaaccaggagcggggagacaatgccaggccggagctggtggaaaatgtggaaaatctcgaaaaatacgatgtggttttcctgggctaccccaactggtggtatggggttcccatggctctgctctcctttttagcgaacaacgatctgtccggaaagcaggtgtacctgttctgctctcatgggacgggcggccttgccaacagtgtggacatcatcacggaggcgctgcctgacggggaaatctcggacaatatttttgactgctatgaggaagaagcgccttcctctcaggaagagattgaaagctggcttacggaactgggatattaaatagtaagggggatgctgtatgcggtggaaaaatggaaagacgacctttgcccttgcaggaatcattttgatacttggcatcctgggcggatgtgccgctgccatggaatatcccaaagcagaggcatccctctttgctatgaatacatacatgacctttacggtctatggcgaaaacggggaaaccgctcttgctgaggcgacggcccagatacagaagctggaatctctttggtccgtaacggacaaggaaagcgaaatttatcgcgcaaatcatagtgatggggaaagtgtggaagtaagcagtgaaaccgccgacgtgatttcctttgctctctatatggcaaaggaaacgggcggcgcattggaccctacgatttacccggtactgacggcctggggctttacgacagacagcaagcaggtccctgcaccggaggcagtcgatgctctgctggagcaggtggattatagcaggattcatttggacggaacaacgctcacggttccaaagggaatgcagttggatctgggcgcagttggaaagggctatacagccatcgtttttgtgccggattcgtttccggcgatgtggctgctacggatgattggcaggatgacagcgccgatcatgtgttatttcattgcggaagggtattattacacgtcaaacttgaagaaatacatgggcagacttttactgattgcggtaattgcccatattccgcacaatctgtgtttgggccataatcttttgcaaatatggaatgccacggatgtcatgtttccgctgctgttcggcctggttgcgctgacagcatggaaaagccagaaaattcattccgttttgctgaagctgtttatcgtggggctttgctgcctgctggcttattccggtgattggaactacattgcggtattgtggattcttggatttggtatttttcatggggacattcgcaagcagttgatcgcttttatagcggtatccggcatctattttttacagccattagtctacggcacttccatcccatatatcagtcggcttggtatctttttggatgttccgctgttcctcttttataatgggcagcgcggcaaaaagagcaaggtgatccaatggggattttactggttttatccgctgcactttttagtgatttatgtgattggaagaatcctatgaatgtgaaaaagctgacagagctggcaattttgacggctctggcgttgattatatttgtgatagaacttcaaattccaaacccagtacccatccccggtgtaaagctgggactggcaaatattattaccgtatttgcggtgtaccattatcgggcaagtgaggtcgctctgattgtttttacccgcgtctttctgggttccttcttcggcggaaacatgatggcgctcatgtacagcatggctggagggatgttgtgcttgttgggtatgttgctgttaaaacgcctgctcccggaaaaatacatttggatttgcagcgtgttgggagcagtacttcataatatagggcaaacagctgttgcttgcctgattgccggatgggggctgctcgcctattttcccttcctgctgatatccggttgtattgccggggcgttcacgggaggctgcgcgcagatagttctgcggcgtttcagatttggaaaaattcacagtggaaatggagggcggaacttgtgatacgaaagacctgggtttattgtccaaattgcaaaaataaaacccggatgcaaatccggggcgacacagagctaaaaaatttccctttattctgtccgaagtgcaagaaggaaaccttgattaatctaaaggatatgcaaatgtccgttataaatgagccagacgctttagacgcagagccgatgaaaccgtaaatcactcttacggacatcggctccttttcattctttgggttggctgtctaaggcagccttaatagttgctttgatgatctgcatggaacgcgcatcgcagttatacagcatccggattatgctttccatttcagaatctgcaacctgtttttcaggaaagaaaatctgatcgggtaaaatggatagctctcgaatcagtttgtagaggatgtcatagctgggtctcttgccctcattttcgatgcggtagacatacctttctgatacaccgatcttttcggccaaagcttcgactgtaatatctgcttttgttcgagcagatttgataatatctccaagtgtttcatattttatctgcactactcgttcacctcctttttattttcacagattcaggccaggtttataatggcatgaaggttcaaattttagagaactataagtgcgtaaaaaaggtgaaccaataggatttataatagatggccctgccaataaaaaaaacgaggttttggcagggtgtttcgtcatgcccatccttccagaccgcgttttggtttggagggatatttcatgcgttgggcattccacgcaccgctgcttatcaaaagcagcgagtatgagtctatggcataggccgcttactgcctgatggtatacggtcaaaaaaagctcctgctttacaacggcgatttgtgcctttcaagatgaactggtatgccataatttatgcgaactaaaaagaaacgcacttgtagtttgggttcatagcccatctgacaggtgcgtttttctatatagaggccctccgttcccatgttgtagggggccgcccgatcagtctgaatttctcacaattcagactgatcggaggtaacactatggacgaaaggcgtccaaaaaggagaaaagataaatacaatccttacaccctctccaaaacaggaaataagcattggctatcctttcgggatgggcaagggattctgcatgaaatcatgattgatcgggagctgtttgagcttttggaccgctttgagttggacgacctctcttttttgaatgaggttgaccggcattatgagcactccgaactcaccgacagctcactgtttgagcgggcagctgtacctgcggaatctgtggaagaaactgtgctgcggaagatgcagtatgaaagcctgtatcgtgccattcgagatttaccggaagtgcagcgccgtcgcctgagtttgtactattttcgcgggcttacatacgcccaaattgcagaattggagggatgcaagtatcagaccgtgcaggaatctatctatgcggctctgaaaaacctgaaaaagtttttgaaatagtccctgtgttttagacgctaagtgaggaaacaggtggagaggtaaaattctctgcctgtttcttctttattaaaaggtgaatgggctggaactttgaaaactgcatacccattcatcaggcacattcccgctgctttggcgaaagccaaagcccaggcggcggctgcgcggcgatctgctgggagaaaacaacgagataccaccgaaaaagaaatgacaggtctttggtttgtttccccggcagggagcgagaaacagcaggctgccagtaccggatggctaccggtacggccaggaccagcagcggggacaatgatactcccgtccagcctaacgtccgagcgttgaagcggctctgtttgccgtgatccgtcgcaggcaatgggggcggttgcgtgagaaccacgcgaggggcgagattccccgtggagctggcaagccgccagccgtttgatgacttcccacccggtgcttcggggtgtcgaggacaaataggagcacctttgaaatacgggtcgtacagcaggacgggccaatgaaaacaggagaatggttttaactctccccggccttcattctgttctgctgcgcggcctctacataggcggcccacgccgcctaatttttcaaagggaggtcataagacatgaacaggacatatctgcgcggcgatatgtattttgccgatctgggccggggaatcggctctgaacaggaaggctatcgccccgtcctcatccttcaaaacaacacggggaacaaatacagccccaccgtcattgtggcggccatttccagtaaagtagacgccaaggcaaagctgcccacccactatcttctcaaggcggaaaacgggctggagctgccttctctcgttcttttagaacagctccgcaccattgacaaaaaacggctgggcgcgtacatcggcaggctggaagaaaagcatatccgaaaaatcaaccacgccctggcagtcagcgtggggttgatcgaggaggttcccgcaaacttaatcatgtgcctttgcccggcctgtgccaataatttctacggcacaggctcttattatttgcgcagggttcaccccgacagggtggaaaaggacatctgcacctactgcggccagcgccccggctttgattatgaggttgtcaagcgccatcaatgaccggggtacagcatatggaaatcgtatttcataccgggaaagacagcgaacaatccctgcgccagttcgctgaaaaacgcgccgagttactcgcccgcgaattgcgggacatgaacgcagaagaattaaaggcgttgctttctacactgaaagaggatcatcgcacctttgagcagaaatgaggatgttcctataataaaggagatgggacggctttcgctccgccctggaaaggaggatatttgagcatgaaacgaaaagcaagaatccagacgggaattgatgacaggctggtggctatttatgcgcgaaaatcgcgcattacgaataaaggtgatagcattggtgttcagttcaagcaaagcgccgactatgcaatcaaccagctttccctaccggaagattacgaatttgcccggtatgaggacaagggcttgagtggttactattccgaccgcccggattttcagagacttcttcgagatattgagatggagaaaatcaaggctgtggcctgttataaattagaccgaatcagccggaaaacttccgacctcatgcggcttctggaatactttgaacgtcacgatgtgacgcttttggtctgctccaacaatatcaatacgcggatcagcacatccaaaatcattatccaggtgctggccattatcgcagaatttgaacgcgatattctcacggaacgtatccaagataacttgatggagctggcgaaagatgggcgctggctgggcggcaaaacaccgaccggcttttcttcccagcgtgtgacaacgggaagtggaaaaaacaagagtgccatcagttttcttgtccctgtgcaggaagaaaaagagattgttctggaaatttacagtaccttctgggagacacgctctctcttgcagacggcaaacatcatcagtgagaaatatgaaacaaagcatggcgcgaagtttaccacatccaccatccggctgatactgcggaatccaatctactgcatggcggatgaatattcctacaactactttctggagcatgacgggaacctatttggggaaccgtccgattttgatggtcagcatgggcttactgcttataataagactgaccagataaaagtggaggatgaggattccacctttttcaatcccaaattctcacagcttcttaccaggaaacccattagtgaatggattgtttccgtgggccgccatgagggatttatcagttcccggaaatgggtggaaacacaaaatatgctggatgagattgccgaaaagtataaccggcctcatagaaaaaccaatgctttgttgtccggcttaatgtattgtccgatttgcggaaaacggctgcgggtgctgccggaatctaatcgctggacgaatggcaagcctcgattcaagtacgcctgccctggcgtgcgggcaaaggaatgtaccttcaaaggggttgagggtgtaacgctggatgaatttgttatccactcactctccagcctgcaagaagaacattccgactattaccggcagcttttggaaaacagggttgccagtatgatccgcaccgatcaaagcgagaaagagtaccaggaaaccaaaaaggcgattgaacgcttaaatgcggatattgccgcacaggtacgaaatctgcgtgaagcagatgacacccttaaacgcttcatccaggatgatataaaggaactgacggacgagctggcaaagcgcgaagctgccatacgccgaatggaggatacacaatctgaaaatcagtatctcatccatgaactgaatggtatgaaaaaaaggctgctgtcctttgaggaatttgcaaaggacgcacagcctgaagctctatttactttggttcactcgattgttgaccggatttatattactactgatggcaccaaacagaaatgccaggtgtatatcaaaggctgcgccacggaggattattccgacgtactcggcgcagccgggtacatagaggaagaacccctgttacaggtagtgtcgtatatgccgccgatgtgtgatttagattactatagcattcgcaccgaagtacaggaggaaagtgttctacaaagaaaagagacgagaggtagggaaaatactgagaacactttgcgaatggaaaaagataaaaattgtggaagcagaagtatgtcccgatcatgtacatatgctggtagaaataccgccgaaagtagcgatatcaagctttatgggatatctgaaagggaaaagcagcctgatgatctacgaaaagtatccggagctgaaatacaaatatcggaatcgggaattttggtgcagaggatattacgtggacacagcagggaaaaatgcaaaaaagatacaagaatatattcaaaaccaattagaagaagacaaagcaggggaacagctgacgatgggaaacttctaaaagactcgtttacgagtagcaagtaacaaacttttcgcggctgccagatcgtaccaacgtgacgtgacacgtgccgctagtaatatagggctttgcccgcatatgaaatacccccggcttcgccgggggatatttatttgcgcttatttgtgcgttttcaggtagttctcgatcgcgccgaccacggttttcagaactttgatgcgcgcgtagtatttgctgttcgcctcgacgatgatccacggcgcgtaggtcgtcgaggtgcgcacgagcatctcgtccacggccacctcgtactggtcccacttcgtgcggttgcgccagtcctcctcggtgatcttccactgcttgtccgggttttcctgccgctccttgaagcggcgcgcctgctcgtccttgtcgatctgcatccagaatttgagcacgatacagccgctgttggcccagctttcctccatgttgttgatctccgcataggcgcgccgccactcgtcgcccgaacagaagccctcgatgcgctcaaccatcacgcggccgtaccacgagcggtcgaagattgtgaaatgtccggccttcggcatggcggtccagaagcgccacaggtagtggtgcgatttctcgaggtcgttcggcgcggagacgggctgcaccgcatagccgcgcgggtcgagcgcctgcgtcagccgtttgatcgcgccgcccttgccgccggcgtcccagccctcaaaggcgagcacgaccgggatgcgccgccggtacacctcgttgtgcagctcggatagcctgccttgcagcgctttgagctgtttttggtactgctccttcgtgaggcttttgtcgaggtcgacgccggcgagcgcagaggcgcggaacgcgtcggggtagatggccgcgctttcctcgacgctctccttcggcagcgcggcgcggcggtcggcgtccgcgatggcctcctcgagccgtttgacgacggtggacatcaccttggcggctgcgtactcacggtcctcggattcgacgattgtccacggcgcattgtcgcggtcggttttttgcagcgcttcttcggtcaggcgaaaatattcgccgtagtgctcgcagcgccggcggtcgccctccgtcacgcgccaagctgtttccttcgattccccgagctttttcagccgctttttctgctccttctgcgagatgacgaggaacagcttgatgagcacgatgtggtcgtccgtcaagagcttttcaaacgcgttgatttcgtcggccgcggtcgagaggcttttttcgtcgctcttgccgtcgaagcggtcgttgagcagaatgcggtaccagctccggtcgagaatcgtgatgcgcccgcggccgggcatcgtgttccagaagcgccacaaaaacgggtagtagtgctcctcctcggtctcccgctgcgtcgtgtagaccttgaagccgcgggggtcgagcggctcgatcagccggttgatcatcgtgccctttccggccgcgccgaagccctcgaccgcgatgatgaccgggatgtgcttttccttgcagatgcgctgcaggcggccgagctttgcatccagcccgcgcgccagcgcgttaaattccttcttgcccagttttttggagaggtcgattttttccagcatagcaaagctcctttaactctaaattacacggaatttttgggatgttctatgagaatattgtatcattattccaaacgaaaagcaagcgcgggttttgtccgcgccgccgggccgaacttgacaaatgcggaaaaagctgttatactataaaaaatccggtttcggattatacggtttcggatgatgagggcgggacgatggaaaagaacatgccggcggcggactccatagaggcgtaccgggccgtgtattggggcttggaggcgctgtacggactctgcgcgaaggcctgcggcctttctgaaatggaatactgggtgctgctttccctgcacgacggcgtggagacgcagagcgcaatcagcggcgtgctgggtgtgagccgtcagacagtcaattctgcgtgtaagctgcttgtcaaaaagggcctgctttccatggaggcgctcgaggataacctgcgtgtcaaacacatgcggctgacagaggcgggccagcagttcgtgcaggactatatggaagaaatattccggatcgaggaggatgtgtggcgggcgttttcgcaggcggagcgcgcagcgctcgtatcgctgacccgcaagtacagcgcgctgatgcaggcggcgctggaaaaaaagaaataaaagccatcggagggcgcatggccgcagccatgccgccggaaaagatgtcgagtgcgctcggttttaaaaggccgggcgctatttttcaccctgcgcacgggcgtgcggcaggaaaatttgaagggagaacaaagcaatgcgtatccaactttccgaccatttcagctacgggcggctgatccgcttcacgctgccatcgatcgtgatgatgatcttcacctcgatctacagcgttgtggacggcctgttcgtctctaatttcgtgggcaaaaccccgtttgccgcgatcaacctgattatgccgattttgattatactcggtgcgctcgggttcatgatcggcaccggcggcagcgcgatcgtcgcgaaaacgcttggcgagggcgaccccgcgcgcgcaaaccgctatttttcgatgctcgtctacaccacggtggtgggcggcgctgtgctggccgcggccggcgagctgagcctgccaattgtttcggagctgctcggcgccgagggcgcgatgcttcaggactgcatcctgtacgggcgcatcatcctcgcggcgctgccggccttcatgctgcaaaacgtgttccagagctttatgatcacggcggagaaatcccgcctcgggcttgcggtcacggtggcggccggcctgaccaatatggtgctcgatttcgtgttcatcgtgccgctcgggtgggggcttgccggcgcggccatcgccacggcgatcagtcaggtgatcggcggcgcggtgccgatcgtctacttcgcgcggaaaaatgacagcctgctgcgcctgacgaaggcgaagttcgaggggcgcattttactgcgcacctgcacgaacggctcctccgagctgatgagcaatatctcggcttccattgttacgatgctctataatttccagcttatgcgcctcgcgggcgaggacggcatcgcggcgtacggcgttgtgatgtatgtcaactttgtgttctccgcaatcttcatcggctattcgatcggcgccgcgccggtgatcggctatcactacggcgcgcagaaccatgcggagctgaaaaatctgtcccgccgcagcctcgtgctggtcgtgatctccggcgttgccatgaccgtgctcgcggagctgctcgcccagccgctgacgcacgttttcgtcggctacgacgcggggctctacgcgctgacagtgcgcggcttcatgctgtattcgatctcgttcctcgtctccggcgtcaacatcttcggctcggcgttcttcaccgcgctgaacaacggcctcgtttccgcggcgatttccttcctgcgcacgctggtgtttcaggttgcggtcgttctgcttctgccgctgcttctcggcatcgacggcatttggctcgcgatcgtcgcggcagagctgctcgcgctggccgtcacgctcgtgttcttcatcgtgaagcggaagcagtaccattacgcctgattctgccgcgcttgttcgggcgggggaaagcaattcaacgcaaacggagtggcccgcagcccgcggcgccgccccgttttttttcgctctttttctgcggcgcgcggaatgccttgaaagcagaaaatctataaatttcttctgcgcagaatcttgtgcttttttgtaaaattgtgtagaataaattgtaaacccgcgcatgcggcagcagcgggtgcgcgcaaacctaagatttggagagaatagaatatgtttggaaaaagatcggacggccggcaggtgcatgaggtggagccttttcagcgcattatcccctatatcatgcgcacgcgcacggattcgatgaatatgtttgaggaaagcattccctgcgcgggcatggacggctacgtcagcgagcggcgcgcaaagggcgaccagatcacctatctgcacgtggtggtcgccgcgctggtgcggctcgtggcgctgcgcccgcagctcaatcggtttgtggtgcgcggcagaatctatacgcgcccgaaaatctgggtcagcttcgtggtgcaccagagtctgcgcaccgacgacgcgggcacgacgatcaagctctgcttcgagggcaccgagagcattctcgagatttccgagcggatcaacgcggcgatcctcaaggaaacggcgcagaaaactgaatcgaattcgacggataagctcgccgggctcatcatgagcatcccggggccgctgatccgcttcgtcgtcaacacgctgatttttatggaccggcacaatattctgccgaaggcggtgatcgaggcgagcccgttccacacctctttgttcgtgacgaacctgcgctcgctcggcatcaaccacattttccaccacgtctacgagttcggcacgacgggcctgttcatcgcgatcggcaaggagaagaacacgccgacgctctccggcacgcagatcgttatggaaaaacgcatgggcttcggacttgtcgcggacgagcgattctgcgacggcctctacttcgcgcgctcgctgaaaattatgaaaaaattcctcagcaacccaaagctgctcgagcagcagctcgaacacaaggtggaggacgtgcggtaagctgggaaagggaatttccagaaaaatattgacatttttctggaatctggtacgctatattatatagttcctcggggcaaacacctcggggcaaacacctcggggcaaacacctcggggcaaacacctcggggcaaacacctcggggcaaacacctcggggcaaacacctcggggcaaacacctcggggcaaacacctcggggcaaacacctcggggcaaacacctcggggcaaacacctcggggcaaacacctcggggcaaacacctcggggcaaacacctcggggcaaacacctcggggcagaattatgccttgggggagaacaaagaaaagcagtctccttcaagaaaaatgaaggaggcttttgctttgaaaaaatttttgattggtttggttttgtcctgccttttactagcctgtgcgtttccgctgatggtttttgcggcggagtatagaaactttgccactgtcgaaaaccgctcctacaacggaacaaggagtgttagtgttacagacatgtattttgcggctgccgcatcagatgaggattacgaaaggatgtcagctacagctacggggtggcttccatctccgaatgctgggcattatgattctttgagcgggatgacaggtctcaagttgaaagaacgtgatccgtctttgtacccggatgatcctatcgattggaatgactggtatgatgtttctgaagatgtttttgcttcatccgtgattccttcagacgtaacaattgaaaaggccgaaccagagctttctattagaacatctgtggcatccgctggtggtgggcaggaaattcaagtgacagttgttctagcaaatgactttgattatgaagcgggaattccgaccgcagagcagattgaaatttctgcaacgaatgctgttttaaaagatggaacagcgataatgcggagcggaaatcaatatacagcgacatttattataagtaatgagatatcggcgcagaaagcggagtttttcgcgaatgtatcagcgagtgcgacaaattatggagtgctgaaacaggctgtatccgcttctgtgacaatcgataatccggccgactattcggcagtttaccgtgcaatcgagaaagctaatgccttgaataaggatgattataaggatttttctgcggttaaagctgcaattgatgcggtggaagagggtaagcatatttctgaacaggaaattgtgaacggctacgcacaggcgatcgaggatgcgattgccgccctcgagtacaagccggcggactacagcgcggttgacgcggcgctcgaaagggccgaggcgctgaacaaggacgactacaaggacttcaccgcggtggaagcagcggtaaatgcggtggtgcgcggcaaaaatatcacggaacaggctgtggtggacggttacgcagaggcgatcgaaaaagcgatcgcggcgctggagctaaagccggcgcccgatccgtcgtccgcgccgtcggcacagccgagcgctgcgccgacagagacgcctgcaccgacggcgggcccaacggctaccgctgtgccgactgcttctccggcaccgacgcaagcgcctgtggagcagccgactgcaacgcccgccccgacggctgcgccggagggtgaaaacgccggcggccccaagacgggcgacacggcaagcgtactgccatgggcggtgctcctgctcgtctccggcgccggtacggccctgtgcacggtacgaaataaaaaacgataataacgggatggaaaacgcctgcggccggaaatgaacggctgcaggcgtttttatgcttttgaagcgctgtgcggaaaagcggggcacgttcggaatgtgtgcaggccgccgcccggcggttctgcgtgccgcggggctcagaccagaacccggcgcaccatgccgtacaaaacaggcttcatgttgtcgatcgtatcggggttcccctcgatgatggaggagaagcagacggagccgaccatctcgatcaggacgaatatggtcttgaaaagctcgtcctcggtgcggctttgggcgaagctgctggcttccagcgtgccggcgatcttgtcccaaagcggatcttcgcgcaggctgagctgccgcttgaccgcgggccaggaaaagttccgctcgagcagccgcagcgtcagcttgttccgcttgaaatactcgatcacgtagtcgatgagcagcacgacgttctcggtgaaatccccggtgcgccgggtctgcacgtattcgtatccctcggcgagcacccgggccgagatttggtaggcgagctgctgcaaaagatgctccttgtcgtgaaaatacaggtaaaacgtgcccttcgccacattggcgccccgcacgatttcatcgacggaggttttagccacgcccttttccaagaacagcgcgtaggctgcgtcgatcaggttctgctttttttgctccttcttgcgctgcactgcggcggccccctttcttgcgtgtgctgtctttatatatagtatacggtattttgacgggaaaaggcaagtgcaaatctgtatttcattaaaatgactaatagtcacttacaaaaacaggcgcagatttgttgctttggttattgactattagtcatttttggagtatgctgttttgcgaaatgataaatgaccattggacattttttgagaaagaaggtatggactatggagcattttgcccgatgggtggtgcgccgcagacggctcgtgctgtttctggccgtgctgcttttgattccctcggcactcggcgcggcaggcacgtacatcaactacgacattctcacctacctgccggaggatttggattccatgatcggcgaggcgtatctcgaggacgatttcaacatggcctccgtttcgatgatcacggtggagaacatgacgacggcggacacgctgaagctgaaggcggcgctgtccgaaatcgagggcgtgcagagcgtgatgtggacgagcgacatcgtcgatgtgacgacgccgaaggaaatgctgcccgacgatttgcagaagttcttttacaacgacagcggcgcgaccatgctgatcgtgcagtttgaaaacccgagcgcgcacgagatcacgatggcggcgcagcgcgaaatcaaggatacgctttcgcgaagctgctttatcggcggcatgtcggcgatcctcgaggatacgcgcgcgctggtgcaggaggagatgccgctctacatcctgtgcgcggtgggcgcctcgctgctgatcctgtttttgagcctcagggagacggtgatcccgctgctgttcatggcgggcatgctcttcccgatcgcctacaatttcggtacgaatatcttcctcgggcagatcagctacatcaccgaggcgctggcgaccgttttgcagctcggcgtgacgatggatttctcgatcttcctcctgcaccgctttgaggaggagcgggacggcggcgcggacgatgaaaccgcgatggtgcgtgcggtgcagaaaaccttttcctcgatctccgccagctctttgacgacgatcgccggctttctcgcgctgtgcaccatgcgcctgacgctgggcatggatatcggcctcgtgatggcgaagggcgtcctgctgggcgtcatctgtacgctgacggtgctgcccgcgctcatcatgactttccgcggggctatccgcaggcacacgcaccgcaccttcatcccgaagctcagccgcacggcgcggttcgtcgtgaagcaccgcgcgcccatcctcatcgtgtttctggtctgcttcctcccgttttcgattgcgcaggccaaaacaccggtatactacacgatttttgacgcactgccgcaggatctgcccggcatagccggaacgaaccgcctgaaagaggatttcgacatgacaacctcgcacttcatcatcgtggaggacgatgtgcccgaaaaggagctgcaggcgctcacggaggcgctcggacaggtggacggcgtccatcaggtgctgagctatgagacgtttctgggcgcggggatccccgagcgcttcctgccgcaggaggcgcggtcgcttttcgaggccggcgggcacaagctgctgctcgtcaactcctcctataagagcggcagcgacgcgcagaacgcccagctcgacgagatgactgccctcgtcaagcagtatgatccaaacggggtgatcaccggtgagggcgcgatgacaaaggacctgatcgaggtggcggacgaggacttccgcagcgtcaacgtgtcgagtattgtgctggtgttcctcatcgtcgcgctgtcgttccggtcgctctctgtgccggtgcttctggtcgcagcgatcgaaagcgcgatcatgatcaacatgggcatcccgtactttgcggggcagacgctgccgtttgtggcgagcatcgtcatcggcacgatccagctcggcgccacggtagactatgcgattttgatgatgacccgcttccgcgaggagatgaacgcggggcacacggcgcaggaggccgcgcgcatcagcgtcgagcagtgcagccagagtattctgacgagcggcctgaccttcttcgcggcgacattcagcgtttcgctcgtatcgaaaatggaactgatcggcagcctgtgcaggctgatcagccgcggcgcattgatcagtatggcggtgattctgctggttctgcccgcgctgctcgtgctgaccgcgccgattctgaaaaaaacgacataccactggatacagcctgaaagaaaggctttgacaccggagaaaggggcttgattgtgatgagaaaaacaggaaagcggctttgcgccgcgctgatggtggcggtgctcggggcgggctgcgccgtgccggccgccgcggccggggcggataaggccgtgcagaaagatgagaccgtttacatgatcctgaatgcggacggctccgtgcgcgaacagatcgtgagcgactggctgcacagcgacacgggctttaaggactatcgggacgagagcacgctcaccgcggtggagaacctgaaaagtgacgcgcagccggcgtacagggacggcgcgctcgtttgggacacggatgaaacggacctgtactatcagggggaaaacggcgtgacgccgccggtttccgtttccatcgcctacacactcgacggggaggcgatttccgccgaagcgctcgcgggcaggagcgggcacctgaccgtgcgcctctctctgcgcaataatgcgtggggcgaggcgcagatcggcggcgggacgcgccgcgtctgcacgccgttcttcacggtttgcgcggcggtgctgccggcggataacttccaaaatgtgacggtggcgcacggcatcgtgcagtcggattccaaaacgcagctcgcctgcttcctcgcactgcccggcgtttcggaatcgctttccggcctgattccggagggcctcggcgaaatcgaggactacctgctcgacgacctgacgcttgaggcggatgtgacggactgcaccgtgccggatttcctctttgcggcggcgcccagcatggagtcgctcgagctggatggcgattcgctctccggcgagatggcggaattgcaggacgcgacgcagcagcttcaggacggcgccggtgcgctggacgaggcggtttccgcgctggaggggaagctcggcgaatttgccgcgggctacgcgcagtttgacgccggcgtggacgccgcgctttccggcacgcaggcgctggcgcagggcggcgaaaatctcctggaaaatgccgacctgctttccgacaaatccggagaacttgcggccggggcgggcaggctcaatgccggcgcagcggagctttccggcctgctgaacacgcagctcgtgccggggctcgtgcaggcgcaggcgcaggaggcggcgctcagagagaagatgaacgcgctttccggcgcgctggacggcgtatcgatcccggacgtttccggcctgcgagaccagctttccgccggtgcggggcaggtgtttgacagcgcggcttccggcgcggcttctgcggcggcagaaaacacggcctccggcgtgcgtgagggctgcaagcgcatcgtcagcgaagcgctcgccggtgtgcagagcgatgccgccgcgcaggcggcgcaggcggctgccgagcagactgcggccgaggtacagagccagtaccagagcaatctggcggcggttttgcagggctgtgtcgacagcggcgcgctcgatgcggatacgatgaatacgattctgaacggtatgtgctacgactataccgcgcccgatttcaacggcgcgctcgacctctcgccgtatgccgaagcgattaacgcggcgattgacgcgcaggtgacggtggatcccgacgccgtggcggcgcaggtgctcggcgcgccggagatgcaggcggcgcgggagcaggcggctggtgcggtggcgtccgctgtgccggacatcgacaccgcacagctcgaggctctgctcggggaattccgcacgctttccgatgaagcggcgggcatgctcgggcaggtagatgcgctttcggcggcgctgtacgacccggcggatccgtcggatgccggcacggtcgtcggtgcggcatccgctttggcggcgggcgcggaggagctcagcgacggcgccgcggcgctggcgggcggaaccggcgcgtttgcagacggcgtcggccagctttccgcgggggccggcaacctgctgggcggcatggacgcgctttccgcctccagcaagaccgtcggcgcttccatcgcgcagtttgaggacggcggagcgcagctcagtgcgggcacggcctcgctcaaggcgggcatggatgcgtacgccgacgaggctgtcggccggctgatctcgctggcggacccggattccgagcttggacaaacgttgcgggccatgcaggaccgcgcgcaggcgtatgcgggcacgggaagtgcggagaacacggcgatgcgcgtcaaatttatcatgcgcaccgaggcggcggccgccgcagacgccgcggagccggaggcagagatcccggccgcggaggaaaacagcttctgggacagggttctcgggctgttctcctgatgcggcgcgtgaaataaaatccatcgtgcgggcgttccggtttgaccggagcgcccgcacgtgtttttgtttatagaactggaagaaaaaatatgcctaaagaagatacagccgatccggtgctgtgccgatataggcgggaaccatagctggacagccggccataccggggacggaagaggttgctgaaatgggaaaatcgaaaggaatgcgccgcttttcctgaaatttttattatagcagtttttgaaaccgcaaatcatccgcaattctcaacacgctttttctgccttttttcgtttttttcttgcatgttacagatggatttttttaggatattctgttattatttataatatatacaggaaaggggaatccctatgctacaggattttgacttcgatttttccggatttgaggacgtacctccgccgcagccccgcgcgacctatcggcttaccttcacagaggaggaccggctcagccagaacgattcctttcaccgcgtccttcagggagcctgcgcctttcgcctgcagctcagccctgacggccgctttattcgcctcgatcctaagggaccccacaatctgaccttctcgaaggcgggcatccgcacgcatcatccgcttggagatatgctccaccggaaagggatggagccgccgctgtcctacgtcctgtgctggcgggaggatctcgactgctgggtggggcagtatgacggtcttgctgcgcctgcgcccgtacctgtgccgcagagaggcaggcgccgaaaaacggcgcccgaggaatgaggcgtctccggcgcctttcccgcagggagcgcctttgggtgcaggaggctatagaccagctctgcgcataccatcgcgtgagcgaccgggacgaggattaccgctccgtggcgtggactgcctttttcggcgcgtaccgccgattttacgccgtttcctcccctgatttctggccgtacgcctatgagcagatcagcgccgcccttgccgtggaaaagaggatccgtcaggattgggtgtacaggattctttccctgcatgtgcccgcggcgcccggttccggcgaaacgcttctgacccgcctgcccgaccgccggggcgatttcaccaacggcgtttcttttcgggattttctcagccgccagccccgggatacggcgcggctggctttccatttgatggacggtgacagtatggaggaggcacgcagccttctcggaatgactgataaagaactgcgctgtgctgtggagcagcttcgggaggctctcgctcgctactgtgcgatttgatagtggaggccgatccccggcagccgtgtttttgcggcccaagatattggagactaatagagaacccctaaaggagaatccgaaaaaatgcaggcggtacaccattcggattccctctaggggttcattttattatacctctttggggagctgataaccggagccttcgcagtacaactgcggggtggaaacaccgctcttttgagccatgccggcaatcgcttcgcgttcaaggcctctctctgtgaattaacggagaataagtctcggcagcgctgttttgctctttgcaatacgcaataagagccgccggcgtactgccgatatgaattgaaagcggatttgccatcagcttgattccaccgtgagaaagcaggcttttgagatcatccgttaagagtaggatagtccgttgaaaaagaggcgcgagcgtcaggagggcatcggcggatagcccgaccgcggttttcggctctattcttctgccgccttatcgacacagcgaatggcattcaggcagcggggatagccgatgtacggcagacactgggaaacggctcggatcaggaaggctctgtcgtttcccatattcatatttcctttggcgtgggcgataagctgcggctcgcagccgccctgcgccataagaaagcagaaggtaatcagctcgcgctctgcaagggtcaggccgtttcgcgtgtagtaatcgccgaagcagtttgccgccagccagcggttaatatgtcccgctttccaagcctctttcatttgttctccgaaaatctctgcctgcgcttcaatccccttttccagccggttatcaagggttgtcgtggcctgccctgcaaggggcagccgaatgccccgctctgcgagcaccgcgttggaaatatgcagaaagggcagcatcctgccgtagccgatataatcggcggcctgataaacgatctcctttgcggcgatcggtgtgacgccgttttccaaggctatcggaagaagcgccttgtaggcgtctacaccgccgcagccgatcagtgccgccaaaatcaccatgcagcgtgttttttcctctaactgctggttttcttcattcggaacctcgctgaaagcgaagtattcgaagcgctctgcgaattcggggtcggtaatatgcaaatccatttttatttctccttgtataaattcagccataggaaaaagcggtcgatatctgcgttccagaaatcccagtcatgccggccgggctcctcataatacgtgcagacaaatcctttggacaccgggtagtctcggaattctctggccggtgcgatcagctcgtcctccgttccgcagctcaaataaattttcggcattttttgcggagaatgctcggcgatctcgtccgccaaatgaaacgggtcgtggcggcttccttctattttttccgaatcaccaaaagcgttccactcgtggaaggggctgcgtttttttccaaaaccattcctgtgcagctcaacgggtaatcagcgctggtgagaatccggcgaaggcgccaaaaacttcatggaactccagcccgttgcgtaccgcgccattgaacccgaagatttcgtgcgctgcaaaaattttctcatcccatagctgaaaaagcgtttttcatgcggcggccctctacggagcgaggcctatgttcttgagccatttgccgaccgcgctgtcgggatcggacgatgagccgctgccgatgtgaaggccgtctgtcatttctgcgctgggttcaagagatttcaccgtgtccaccgttccggaaagcccgctgccgccgctggtacagaacagggcaaccgttttgccggacaaatcgtacgtgtcgaaaaaggtgtagaggatcatcggcatatcgccccaccagatcggatagcccacatagatgatatcatactgctcgagattctcgatgcttcccgaaattgcagggcgggcgttgtcccgctgctcttcctgcgccagatttaaaaccgtgtcgtagtcgtcgctgtacggctcggctgggatgatttcaaaaatatcggcgtcggtttgcgtctgaatggcctctgcaacatttttggtgctgcccgaccgagagaagtaaaccaccaacgcgttagagcctgttttatccggtgcagaggagccgcttggggcgctcgcttcctcgctgggtgcggaagaattgtctggattatttgattcttcggcgggggttggatcaggtgcgcttgactgctgtggggcagaggaggcggaagcagcacgattcgtgccgctgctgcatgctgcaaaagtaagcagcagcgcgagtgctgtaaaaacagcagcaattcttttcattattacactttcccctttctattttgaatgatggagtttcatacagctgcctatcacatcacccgtgcgcaaatactggtaattcggcatttcaaacaaaaccggctttaatttcgcataatcaatttttccgttttcgttcagcacgcttttttctgcgtgaacagcagcgattttgcagatgaagctctcaaatccttttgtttcatagatgtcatcgacgaggcattccataactacaggggattcatcaaggataggtgcacctgtttcggcggtgtggtatgcaaatacctctgatttgtcggtcgtgcttccgctgacacaacccgtataatcggccttgggcagcatggcctcatttacaaggttcacagttaaagcatggctttccttaatccctttattgctgtaatgagttttagacaagctgaccataatgcggtcgtgaccgataatccctaaatgccccacaagtacatagttgggttttccgttcactatggttcctaccacggcaagaggggttgggtacaaagccagatttgtcccgatatttttcttcataaaatatacctccggattttaaatacattattttttctttttgccgccgctgtgtttcatttcataccgcaggtaatctaagcgatctaactgccgctccttgaaatgaatttcgtcgagcgttccgttcctctttgattccagcattttaagccgctcgttttctccggattcgccctgcaaaagcaatttcatatacctttctacttctgtattggtgaatccgatgtcatggagcgtcataatggtgacgagccgctcgaggtcgctgtcgtcgtagcgccacgagcccatgacctttttcacttctccgcataatccccagctttcgtattcccgcagaatctggatgggaatgcagtatctctcgcttgcttcatagatcgtcatctcaaacgcccctccggatcataaaaaatgaaggtgctccgtcttggaacaccttcattatagatctggtagtttggaatgtctaatgcttataatttattgaaagctatgccttttgcgcattcattgccgacggcatttgagcccgccgtatataaatttggcggatgttgcttttgcggcgcaagacctttctttgagaaccgaaattgttccccgccatgaaaactcgccgcaggctgacctgctgaatttaacctgattcagagcgttgcatttgaaccgtccatagttatccgacaaaaattgctctgattcttgtgcatatatcatgtgctggggaagcactttttaagcagaacgcgggaaaatccattggggatgtgaatgatactaccctataaccctcatggataaggacacagtgggtggcctcccggttcccttaaccagatatttccctcgctttacaggtataaaatacttcttaaatgagctggaaatctacgagctttgcaccacgttctcaaaggtctgtttgctcatacggatccattcctttctttatgcaattgcggcaaggaaaattcttgccggagtttagggcgttctatttggggccggatgtcactttcggccccaaatatctacaagatatcctaaatctttcatcttggctgcgtaaggccggttgggatcatacccgatcgcacagaatttcgagttgggatcatccccgctcttgtcgaattccgaaggattgatggtcggcacaggccctcctgctagccccaccaacacatattgttccaaatggagcgtctcgttgttggctgcgttgggggcgttcttggaataccccagcaacttatggcttttgtaggaggattgtttccgttcccggttaatatcctgagtgatgtagtgttccccgtttttcttcaagacacggtatacgggggaggaaccggcgacctgctgtgtataaatatagcccagaggtccttcacaaaaatagcccttttctcccatggtatctaattccttcaaatccgccacggccatgtgatcctgctcctgaatactgtaagcccgcatcataggggccaaatgctcttcgggcttggaaggatacacatcctgcactagttccttcatagaagtatagtggtagcggggagcgacgcccacacggaaaattccggatttgatggcgtatcctacgaagaaggacgtcatccgctccgcgaaaaaggccaaaagccggaaccgggtctttttctgtgtttcgggccggtcggcgcctttaatcatttgatacttttgcatctctcggaggacgtccgagtcatcatacaggctgtccagaaggtagaagataaacctgcagtaagcatcgaagtactcccacgtggataccaacagacacttaaaatatccataaccgcctttcccggcgtaatcccgcatactaaaatgctcatcaaagtagttctccatatcgggaaattccggattgttctttctggaaagaagatctctggctttctcgaacagaatatccgccataggatggcactggtcatactgcttgtaaatcccctgactgaaccaaaggggctcggataccaccgcgtcccctcccataacagcaggaaccctttgtccagaataactttcagggattatattctcgaaatacgcgttcaacttctctgtttcatatccaaatctggactccaaagaaggatatgttttgtgcggcgcttctgataaatttaaaaacgagcggtagtgcattacgcctacatagccctttttgtctttcggcatcatattcttccaaatgtagtaataggccgtaaactcgctgtaaatgtcttgcttttccggatcagtaatgcatgcacctccggcggtatcccgaagtgagatacggtatccgtcccgcaccgggtttcctgctaaaatggggataattttttcgctttcaaaagtcggataattttctccatcgtgatggatcacatagatttgaacatttgacatgctaatctcctctctaaccaattttagtatcagcttgatttgattgtagcataaaaaacataaataatcaatattatatagaattttcatattttttacttttattttcagagatttttctctaggtgatcccttctgatatggctcccaaaatatgatcagacagtgggttttgaaatataatggacatgagaagctaaaggcttctggaacaggagggaatgctgtcatgactaaaggaagaaaggccaccttcgatgagcgggttgaaatcgtacagtactgcatcgcccatgatcctaattatgccaagacatcagaacagtttgggatttcttacaacttacttctgtcttatttgcacttgggccttagtgcgattattctttgctgcaccttcataaaagcctccttgtcaataatcgcttcatgcacattctctatcagaaacatacttaaagcgccgtcgttcttttcttgtcgcccagttaaaaaatccggcgtataggttttctgcatcagtacctgaccgatgtatttctcattgctgagcatgcggtcaatggcagatgtgctccaaacctctttgcccgttgctgcttttatctcatgctcctccagatatcgcttgattttccgtacaccattcccctgtaaatacaagtcggaaatttgtgtacgatctcggcttccttagggacgataaccagcaccccatccgatcctttggtgtaaccccaaaattgactgtgattgagaatagtcttcccgctgcgcatgcgtgctcaaatgccaaattttatgttcttgcttttgctgcaactttcttcctgcgccatagcaaggaaaatgccgagtgcgctgtcattcaccttcatggtatcaatatcctctatttcggcatacaagcctatattcatttgtttccacttccttatctgtgttaatgtttcgacggtatcacgtccaaatcggctcaatgattttaccagaacgaaatcgaataaacccttctttccatctagaatcatctgacgatagcctgatctgtttttaattcttagagcaaaaccgacatcggcataaatttttataagctgccagtttggattctcccgaattattgtgtcaaaaaaagatttctgtgtgtcaagacttcccaactgttcgggatgatttgtgctgactcggcagtaagctgcaacccgcaatttttcttgcttgtgagagaaaaagaatcgtttttggtatcatagaaaagcatccgtgctaaaagtatagcatggaggacatctttctgtttaaaaatataaaaagctgcgttttgatttctcaaaatgcagcttttaacttgagtttgtgctacaaaaaagatacccgctaaaaatgagaattccggattcggaataagtctattttcatttttacaccgtgtttttttgagttttacttctgggtgtcccgttttggtaaaagaggacgagtctgaaaaaacagcttaaatgctgtttttagggaacaaaatagatgtggctcacttaagggttaaatcgttctatcggttacctcaacctttgttataatatcgcgcagtcgttcgccgtcaatcatatattctaaaatttcatcgacatcttcacaccatttttctgttttttgctggttgtctacaaatttttcgcaaattaacatttgcatcccggactcggatgtgcgttttaatttagggaaaattccaaatactctgtcattatattcaaattcaatttctccgccactgtttacacaccacttaaaatcactaatcgttttaaatcgattatcttccaaactgtttttttctataatctttgacatgaatttcacctcatatgctttaaattccggtgcgccatctggatagttaattggcggtccgggttttggatatccgttactccaatctatatcatggtcatgtgggtctgtatgagcccttggattatcatgatctgtatggtgcctctcttttgttgctctgccatcttcaccaatctttgtttctctatcatatccgcctctttttccatctgttctgcttttattaatatctccgggctcacccaaaaatctttcatcttcgggcttactcggccgccacttcccaccataagcactccccatgccttttatctcgtaatcggatagtatatgcccagtcgattttataatgatatcacaatcttccggccacggctctgttccgcagatatattttacgtatttagacggaacgtatggatcatcattcatataccgccatgaactcagttcataatcaacaaatacaatattcccttgcatttcaggaaacggctcattgtagcaaataattcgttccggctcaatttgccgcagcatttcattgtagccttttagaaaaaactctttttgatcgctgtgattattgtgtgccgacaccatgtaggttgaaactgcgactgtagaccctttctcaatcccgtcaaaacaaaactcaaaggtgtttttttctccccaactgacggaggggataacccttatcccttttgaagcgtaatatgctccacaccagcggttacgaaaggtattgaaaagctgcataaccggtgccatttcagtgtacatactaaaatccggcgacaaaaccgcccggtagcgtttcagcctttcaatgtcgttgtccggatttttccatacccgctcaaacttatagtcgtagagaaagaaatgcaccatgcggtcgaggtgattattgctttcaagcttggctttgtcaaagccgatcagccttaaatcagtaaaatcgtcttcttttgattgaaaccttgggataattggaacttgcaattttcccttgcctttaaattggtttcgcagcaaaaaatggactttacgatacttgtaattttcttctgtcattataacacatctcctattgaatgataagaacaaaaaagtcctttcacgaataggctgaaaacaagcaaaggttgccccaaaataggaaactatttttaaatattcacaaattgtttacaaatgcagtttgtacaaccagccgaaaggcgtcgaacctaacttgattcgacgcctttcaataaatgggtttacgccacaaataaagatgccggtaaggggccgtagtagcaacccacaaaaagttggtagcaagccgaagcgttgtgagcgcgtttacaagcgaacagcgtagacacagcgtgactttttgcagaaaaggaggaacagtggagcgggtgactgattttttatgaaataaaaaaatcggaacgagcacaactcgttccgacgtggcggaagcggtgggattcgaacccacgagcccgtgaaggctacctgatttcgagattttattcgaacccaccaaaaacgggcagtttcaggccgtttaagacgatagttgaaaagtttgtcaacgcaaaaattatgcttttttcgctgtttttacccgttggaaagaaccgtggaaagaacagcggaaagaacaagataaggagaattttaatatgagtaacactaaaattgatagtaaatataagacaatgttttcggattatcccgatgttgtaacggtagcgcaactaaggaaaatgcttggaataagccgacatttagcttatgagctgatctgcgaaaagaaaattaaagcgttccaactcggcaattcatataagataccaaaggtcaatgttattgagtacatcattcaaagtcaagagaatttagaacaatcgcttggataaattaaggacaagaaatcctataaattactgaaccaacctaaaacgacctaagtggtccagaaggcccacttttcgagttttataggtcaatggctgtttagcgatttttggaggcggtttcgggatacttcgtattcgccgaaaatgcttgatattaaaggctttttgacggttgcgcctctgaaatcccgataaataaaggaaagttcgaataacggcattttcgctgttttcggaaagaacaggcactattttggaaagaactgcggaaagaacagaataaacacatcaacaatggcaatacacaggaaaacctacaccgataaaaatatttacgaggtgtattgctatggatgaaaccgcaatcaactgggattcgattcccgatattattaccaaagaccaactctatcaaatctgtcacatcagtaaatcaacggctttgtatctgcttcgcagcggcaagataccgtgcgaatacacgggcaagaaaactcgctgttacaaaatcaaaaaggccgatgttattacatatcttgaaaagagaaaagtatttcccgaatcctattcagcaccggctgggtggtacaaggggaactataccgtgaaaatgaaaacagaagtacccgaacaggttcttgaaaatatgaagctgtattacacggaactgtttgcgcaatacccagatgtgctgactgcgaccgaaatatcaaaagtaatcggttacggcacgacatctatcaataattggtgcaataacggtcatcttaaagccttcaaaagaaacaatatgaatcacattccgaaaatctacttgatagaattctgctgttcaaaatactttcgcactatcacccgaaaatccgattggcatatccgggtgcttcaagaattccctcgttggcaagtgatacgaggattaaaaacataagagtgaatattcgctatgttcgctgtaaaaagtggcgcagattttgaaatgttcactgtaatttttggcacgggcaaaatttgcaaattcataaatcgcacattcgacttttaatcgcctcctttgtacaatataggtgcaaaggaggtttttactatgactgacacattatttgaacaactcggcggtgcatacacgcaacaaggcgattatctactgccgaacctagctttaccggcggaaaaagaaacgggtaatatcggcgtgtgggcattaaggcacaaacgatatttgaaacaacatcataaggtgctgtactataatttactcacatccggcaagctccattcccacctcgccgataccgaagagcaggcacaacaactttttctccggctggtaaaagaatacgccgaaaaagaaggcgtaaccgaacaactcaaatccgccgacccaatgaagtgggtgcggaagatgaataatattcgaaatagagcggcagaaatggtaaatattgaagtcatatatgggcaattataacgaataagccatattatctgcttatctaattaaaatcagtgccaactttgaacttaattcatcgttggtactgattttttattttcatagctatcccaaagtatcaaattgatactttgggattttgagatgatactttggaataacagaattaataaagcaagagcactttcactaagttcactgtaaaaaatggatttattactcaaataatcgttgaattttttggcatatagtgatatactaatactgacttataatatggaggtgcagtatgtaccgaattgcgattgaaaaattatataaatggaaaaacagtaagcgccgcaagccgttgattattgaaggtgcaagacaggtcggcaagacttggctgatgaaggagtttggtaaacaggcttatgcggatactgtatatattaacttcgattccaattcaagaatggcggatttgttttcagcagacttggatacagaccgcctgattatgggactggaattgtatgccggacgcaaaatcaatccggacaacaccctgctgatttttgacgaggttcaagaagttccgagagcacttgcttctcttaaggcaataccgcacagaaaagtaggcgcgatactgccagaagtgatataataagaccatggataaacagatgacaatgtctgcgcttagtgatgagttggcgcaggtacggacaaagaagaaagaatttctagcccagatcgagcggatcgtcccgtggaaggaatggcttacgctgatccagccgtgctattacaaaggagagcgcggcaataaaccctatccactggagaccatgctgcggttgtatctgctgcaaaatctgtatgacctgagtgatgaagcaacagcggcggaggcaatcgacagccgggcattttcagatttctgcggcgttgattccagcaatcaggtgccgaacggagataccattggccgctttcggaacctgctggtgaagaatggactgcaggagaaactgtttgcacaagttgttaccgcgctcactgaacagggccttatcctgaaaaagggaacgatcgtagattccaccattatttccgcgccgtcttccaccaagaacaaggagaaaaagcgggatccggatgcacatcaggtcaagaagggcaacacatggcactttggctataaagcccatgttggggtggataaggacagcggactggtacacacagtggaggcgacaccagctaatgtccatgatgtgacgcagacttcatccctgctgaccggtgaggaagatgtcgtttacggcgacagtggctatcttggagccgggaaccgtgaggacgcgatcgttcggaacaaatccggacgcaagatcaaatacaaaattaaccgacgtccatctcaattaaaaaagctgagcaagagcggccagtatgccgcaaagaaagcagaacacgcaaagtcttctgttcgggcaaaagtagagcacgtattcggtgtcgtcaagaaacagctgcaatttcgaaaaacgcgataccgagggctcgaaaagcagcgagccaaattcaatatcatgttcgcattggcgaatctgcttctggctgacaggccctgcctggcggcttgaagttgtgcgctctcgcgaagaaatgcgccgggaagcctatggtttcctgcctgatgggtgattcgacagcgcttgcctcagcaattgtgcggtgctgccataggacgatagtctttcgagaaaggaaaacgatatgtcgttgagaaaaaagctgacattgtctatgctcatgattgcggtgatccccgtgatggtactgggaggcttttattatcagtatttcagcggggtccttttgagcaacgtgcagcagcgggagctgcagaataacagccagattatttacagcgttgataactttttcaattcaatcttcacgatttccgattccctgctaatgaatgaagagctcatggacattctgcagaaaagctatgaggaacagagttcacctatcgaaggataccgagacaaggcacaggtggacaagctgctttacaaggacggctattacctggatggcagaatagagactatcgccatatttccgaggaacaacagcatgttttactactgcacaaaggaagacatcaatccgtcctatgatatccatgcggaagagtggtacgaaaagattgccagtaaagagggggcgaaagtattggtgggagtgcaccaaaaccgtctggtgtacgcattctccgacgcagccagaccctattgcgtaactgtcggaagatcaatttactccccatatgattcccaactgcttggcactatgctaatcaacattaacgtacacgatctccagacctgctggtcggctttcaaggaagattcgcaggagcggttttacctgctggatgacgaaaacaacgttgtgttcagcaatctgacggaggagattggcggtaaattctttcaggacggcctggaagacggcatttcttcctgccgaatcgacggggaattgtacgatacgatcgtctcgggctccaaaagcctgggatggaaaagcgtcaaaatgattccacgcagccagttggatcaagagatcgccgttgttccttatatgacgctcctcctcatgctgatccttacggttctggcagttctggtttcaatctttatttccaaaatctttacacgtccgcttcaggagctttacgtgaagctccagcgctttgaagcggaaaaaagcgggactccgctccctgaaaatcaggtggagatcaaaggcctttcccgcagctaccagcacatgatcaacgagatcaacgccctcaccatcaaaaactacgagacggagatccaattgcgcagggcagaactcatggcgctccaatcccagatcaattcccattttatctacaacacgctcaattccatcaagtggatggcggatatgcaaggatccaagcgtatggtaacggcgttggattccctgatcaagctcatgcagttttcctccaaaaacagccgggaggtcatccggattcaggacgagatcgatctgatccgggactacatcaacctgatcaacctcaaatatttcgacaggatctttgttgatgtccatgtggagccgggattggaaaactacgaaacgctgaaattccttctgcaaccgatcgtagagaattccatctaccacggtttcagcagtatggtccggcaatgcacggtgcagatcaacattacccgaaaagaagaccgtattctgtatgaggtgatcgacaatggcaaagggatgagcaaggagaagatccgacaggctctggaggaagatcatcccctcaactcccattcgtttaacaagatcggtctttataatgtgaataagagaatccagtatatttttggagaggagtacggtattcaaatcgacagcgaacccggcaagtacacgagggtgattgtggaaattccagcccgtatctataaggaggagatggcaaatgcgtaacatcgggatcgcgatcattgatgacgagagcctggtccggctcggaatcaaatcttctgtggcgtgggaagagtatggctatgagattgtaggagaagcggacaacgggcagaccggcctggagatgatcagggaaaaacacccggatatcgtcctgctcgacgtctgtatgccggtgatgaacgggatcgaagttctgaaatccctgcaaaagctgaagattcagtgcaaggttattatcttgagctgccacgatgatttctgttttgtaaaagaggcaatgaagaacggtgcgttcgattacctgagaaaaaatgagatcaacagcgcgaacatcctgacggttctggaggaggtacggcactcactgtgcaaaaagcaggacgaggggcagggaggctgggacagctacgcgcgtcatgtctgcctgcaccgtctgatcaccggcagcagcgaacctgctgaacggcagttgcctgtcagtcaattgcacatccgggaaggaaacctctgctgcattgtgtttgcagtgcagaattaccagaaagtacaggcccgttacggagagggacgccccttcccactggaacaaagcgttatcaacctcacagtggaagtgctgcaccagtggacgcaggaactggaagtttttcttctgcaggaaaaccggtatgttatcctgctgagcagtcagaacagtgtcagcagcacccagtgggaggagaaagtctgcagcctggtccacgaactccacaccgtgttccagaattatctgaatgctgacacctgctacggtgtcagcagcgccgtctcgaaattcactgcattgccggaggcgttcgagcacgcgcgctactctctgcatcttcactattttcagccggacaggttccttatcaaggagatgcgcaagccggatcggacgatgagccgcccggaagtcaaggaatgccttggcgatatcaatatctgtgtgtcgcagaagcaatacacgcaaatcttttcccgattttatgctttcatccagtggctgcagcagcaccacagggagaacctggacgttatgggggtgcagaactttttctccaatatggtgcgcttccttctcctgcaggagggaaaggcgccggaagaagcggtggaaaagcttcaggcctgcgaaaccgtggaggaagcgcagcgtttccttgaggacttccaaaaggagttgaagacaggagagccggctcttgaccagaaaaactacctgattcgcgaggcggcggattatatccggcagaatttgagccgcggcgacatctcgctcgatgagatcgccgaccacctgatgatcagtaagtcttatctctgccgcctgttccaaaaaaagctcggagtttccgtgcagcactatatctacagaatccggatagagaaggcgaaggagtacctgaacgacttccggctgaaaatctacgaggtggcagagcttaccggcttcaacagctccacccattttaatatcgtctttaaaaagattatgcggtgcactccggcagagtacaggaacggcctgaagcagtgagggaaaggtcaatatgaataaataaagttcaagatcctccgcgggtttaagctttgtgtactaaaattgttcaatatcctgatgttttcttcaacagcgtttatggaaaatagtgaacagattctctatgatataagtaacctaattcgggaaaacagacaaaatggaggaatgcagaaatgaaaaaatggaaggttgccttaattggctgcggatcgatcgcggacaatacgtatcttccccggatcggcgagattccggaggcggatctggttgcagtctgcgatatcatcccggagagagcaaagaactatgcagaaaaatttcatgtgccggcctggtacaccagcatcgatgaactgctggagaagtgtgacttcgagatcctgatgaacacgacatcgatcccagcgcaccacgagatcaacatgaaggcgctgcgggccggaaagcatctttactcacagaagcccgtcggcctgacggtggaggaggtgaccgagcagatcgaggctgccaaggcagccggtgtgaaatacactgcttcaccgatccacatgctgcgtgacgacatccgctttgccaaaaagctgattgccgacggctgcatcggggagattatgaaggtgcacaccaacgtttgccacggcggcccggaatatttccagtaccgcacggcggaccccacctggttccaccggcccggcagcggcgccctgtacgacatgggcgtccacggccttaccatgaccacgggcatccttggtcccgcgaaggctgtgggctgcatggccaaaatctccgagcctgtccgcacggtaagaaccggtacctttgacggcatgcagatccaggccgaccagctgtacgataactacatcattacgctcgattacggcgagagaaccatggcggtggtggagtctggtttctgccagaaggacagccgcgcacctcagatggagattttcggtacaaagggaacgatcactttcgtcaacaacggtaacatgaacccgctcgattcgctggaagtttaccttgatgcgccggagcgcggtattcgcggctggctgaagcctatggagtgggatgttccggcttctgagatgaactttttccaatgcaaggtggttcaggatctgatccatgccattgaggaggaccgtcccgtcggtttgcccccggagcacgccagacacgtggtggacatcatgtgcactattccggaagcgatcaagacaaagagcattgtcccgctgcacaccactttctgagcagaggggaactgatcacagatgaggtgaatgttatgaagaaatatcgcattggtctggtgggcttcgctcacatgcacgttttgggtcagatcgagccgtttctgtccatgccggagcgcgtggaatggatcggtgcctcggatatcaaaccgatggtagagtctgaatattttgaaagctccagccgctccatgaacctgaagctctgtcaggagcagtgtgggttcacccgcgtgtttgaggattaccgtgatcttctcgatctcaaacccgaccttgtccttgtgaactgcgagaacgcgtttcacggaatcattatccccgagatcctcatgcgcgggatccacgtggtggtggaaaagccgttggcctattccactgaacacgccatggctattgcccgcgcttcccggatcggtaaggcggactgcatgatcaattggccgaccacatggcaggccagcgtccgcctgggccagaagcttgtcagcgaaggcgttgtgggaaaggtgtaccgtttccagttccgcaacccggattccatgggtccgttctcttacggccaggtcatgacggatcggcagctgggcaaggaatggtggcatcaggaagcggcgggaggcggcagcttgctggactactgctgctacggcaccatcctttccaactggtacctgggcgaaaagcctcagggcgtgtatggcttgaaggcgaactttaaccaccggtttggcgacgcggaggactacgcctccctgatggttcggtaccccgaggcggtttccattctggagggaacctggaacaccataagcagcggctatccctccgggcccattgtctggggcgaaaagggcgccctgattgtggaaaacggcggcgatcacggcattcatgccaacgtttgtgtttacctcgatcgttattccacaacgcccagcaaggtgtattgctccgacgactacccgctgcctgagggaagatccaacctggctcaggaggtcttccatcacctggagaccggagaaccggtacactacaccatggatctcaataacaatctttggtctgccgctatgttggatgcgggaattcgctccagccggtcgttgaaaatggaagaagtaaaaaccgcttgttggacgattgggtaatataagaggaggatgctacatgaaacttgcaaacgtttcctggggttggacgccgatcccggaggatatgccgcatggggactctctgatccgaatcgcggatcagatccgtgaactcggcttcgagggcgtggactatctgggaaccccggaagcactggatgaattcttcacggaggaagcctgccgggcgctgggggatcactcccgctccatcggccttgaacccaacgtgttcgtcttccaggacgcttcgtggaacgacgcctgcagcgaaaaaagggaggacagcgtcaggcacttcgagaaggccgcacaggccgcaaagtggatcggatgccggattgtctccacgctggtgccgatgccctgcggcgcaaccccctggaagttcaaccccgccgcaccggcgatcaagcagggataccatatgcccgccgactactgctaccagaaggactgggataccctgatggacagttaccgcaagtgtctggccattgcaaagcggtacgggctgcgcatgtccgtggagtgcttcccctattccatgatctccacaccgcacgccatgctgcagctgctcaaggacgtcgatgacccggatttcggcattcagctggacacgaaccacctgatcatgcagcacatcgatccggaatggacgatctacatgctgggaggcaaacgtattttcaatgttcactgcaaagacagcgatgccgtctccagaaacaacatccccgccggctgcggcatcaccgactatcccgctgtgattcaggcgctgaagaatgtcgggtatgacgggaacctttctgtcgagctggagttcacagacaacccccgccgctacaacaagcaggcgatggatcatctcaagctctgccttgcgggtgaatactgagctgccgtctggaggcacacagggggtatccccctcgatccgggcgcggcgccgaataaaaattatgtttttttagaagaggagtaggagtaatgaagcagtataaggttgccatcatcggcaacggtatgatttgcaacgcggcacatattcccgcctacaaagccatgggtgacaaggtgaagattgtcgcagtggcagatatccgcgaggaagccgccaaagaaaccgccgagcgtcacgggatccccaagtactatgtggatccgtataaaatgctggaggaggagaaacccgacatcatctccgtgtgcacaccgaacgcataccacaaggagtatacccttgccggtttccgtgcgggctgccatgtagtctgcgaaaagcctgtggctgtaacctgcgcggatgcggaggagatgttcaacgcggcggagaaggcggggaaacatctgtttgtcatccagtctctgcgtttcacgggtaacttcaaagcggctgccggactggcaaaaagcggttgcctgggagacatttactacgcggatctgaacctggtccggcgccgcggcgttccgagatggggcatgttccacatggcgaaagaaaatgtgggcggcgccttctgcgacctgggcgttcatatgtgcgactacctgatgtcaatttccggtaacccgaagatggtttccgtcagtggaagtgctgtgaccaggatcgtcaacaaggagaagaatattgagttctccaatgcggagagcggagctcccaccggtctgttcactcccagaaagttcgacatgaaagagtttgatgttgaggaatttgccaacggctacattcgtctggaaaatggcatgacagtcactttcaagatctcctgggcgctgaatctgcccaacagcaacactgtcagcatctgcggagacaagggcggtctgaccattggggacgatggactcaagctgctcacgacgcagggcaattaccaggccgacgttttgccgagagttttccccgacccatatacggagctctcagatttcaccggccacatccacgagatgaactacatcctgaaggtcctcaacggggaaatgaccatggaggaataccccatccagaaggacgaggttatgaatgtggttgcgatcatcgaagcgttttacaaatctgcacagctgggcagggaagtcactgctcaggaactggaccggtaagcggaagctgcaagggatatttgcacagagcacggcgtgacggaagaacttgccgtttcgccttgggacgaaacgcaacagggggactctgcccgggcgggagagccccctgttctggtgtgcgagacgacaacggaaggggaggaatccatgaaaggaatcataacggagatcgagaggtttgcgctgaaagacggaccggggatccgcaccacagtgtttttcaaggggtgcaacatggcgtgcaaatggtgccataacccggaaacgctgtcggttcggccacagctgatgatttatccggacaaatgcattggctgcggcgcctgtgtggaggcctgcagggcgggagccagaaccctcggcaaaaacggtgccctgcagtacgatcgcaccgcctgcaagcactgcggagcctgcgccgcgaactgcttctccggtgctctcgtcatgtccggaaaggagatgaccgttgaggaagtgatggaggagatcctgcaggacagggcttactaccggaattccggcggcggcgtaacactctccggcggcgaggtttccacgcagccagaatttgccctggaattgctgcaggccctgaaaaaggagggaatttccacggcgatcgagacgaacctgcatgcgccatggagcgtctacgaaagaatgctgcccttcctcgatctggtgatgttcgacatcaagattttcgatgaggaagcgcacagacgctggaccggcgtgagcaatcgtcaaatcctggagaacgcaaagaaggtggcggcttccggcaagccttatctggtgcgtaccccggtgatccccggagtgaacgacacggaggaggagatcggcagcattgccaactacgtgggaaccctgggaggcgctcaatattatgagcttctgctgttcaatcccctgggagagagcaagtatgacgccctgcagatggacaatacatttgccgggacccgccccactggagaggaaggcgcagcacgcctgaaatgggtggccgctcaaacgcccggactttccgtgagggtaggctgacgaagaaagggagatgttgtatggtcaacagaatcaatatattccagccggatgctcccatgagctacgatgacaggatcaaaattttaaaggaaagaaagcttgaggaaaccagggtgaagtccaccatgaaggtgtatcaggacggggatgactatggaagcatcccggctccggagacgtaccagttccattgcattccgaaccatgagaacggttcctggtacgggtatgacgggtggagcaagaatttttacaagctgatgactgagcacccgatctacattgatccggtggacgcgttcacctgccgctggatgttcagtatgatctggtttgacgagaaatccccggacaaggggctgaactggaacccgaattttccctacgatgatctcaagccggaacaggaactgtatggcattatctccgggatcggctcggacgcgcacttcggcggcgactaccggatcgggttgagccttggctggggcgggatcttggaaaagttggctttctaccgcaaaaagcaccccgaacacgcagagttttacgacgcggaggaacttgtggtgcacggtgtgcagaactggatctcgcacgcgattgaggagagcgagcgtctggcccgtgtggagcgccatccggtcctgcgggaaaacctgcttcaaatggcgcaggtaaatcgcaacatcctcaacggtgcgcccaaaaccatgcgggaagcctgtcagtgggtttgctggttcaacatggccagccgcacctacaaccgcgacggagcgggttttcagctcgatgaagtgctcaaacagtactacgatgccgacatgaaagaggggaggatcaccagggacgaggcgatcttctacatcgcttgtctgttgctcaacgatccgcactattaccagatcggagggacaaacgaaaacggcgatcccctgctcagcgagttcagctatatggtgctcgagggagcggataagctggattcggcttgcaacatcacggtaagagtggacgaaaacatcgacagaaagttcctgaacaaagcggtggactacctgttcaagaacaagaacggctggccgcgcttttccggtgacgaggccctgaacagaggcttcatgcgtttgggctatcccgaatcgcttgcccggcagaggatcgcggtgggctgcaactggatgagcttgcccggcatggagtactgcttgaatgactgcgtcaaaatcaacagcgctaaggtgttcgaggttgccatggatgagatgatgagccataagggcccatactccacacaactgctgtgggatctgtaccagagacatatggcccgggctgtagaggtaactgccgagggtatcgcgttccacctgcggtaccaacagtacaacgagccggagctgatgttgaacctgatcagtcatggtcctatcgaaaaaggtctggatatgacgtgcggtggcgccatgtactacaacctctgcatggacggctcggctattgccacggtggcggactcttttggcgcattgcagcagcgggtggaggaggagaagcggatcgactgggagacgctttaccatcatctgaaaacagatttccaggataagggcggtgagcttgtacgccagatgctctcccacagtgcccgctacggcggcggcaacaccatcagcgaccagtgggcggtgaaaatttcggagtcatactccaaccaggtgcgctccgtcagccagaagtatccgggctaccagtttatccccggctggttcagctggtcgaatacgattgtgctcggcaagcaggtaggtgccacccccaacggccgccacgccttcgagccgatcaaccatggggccaacccgcaccccggcttccgcaaggacggcgccctcaccgcaatgagcaattccatctgcgcggtgcagccgggctatgggaataccgcgccggtacagctggagcttgaccctggtatggggcgcggtgaggaggctgtgcaaaagatcgccgactatatcatgacgctgttcgagcagggggccaccctgctgaacatcaatattgtgaacggtcagcagattctcgaagccgacaaggaccccagcaagtaccccaacctggtggtacgcgtcacgggctttacggcgtacttctgctctctgaccccggagttcagaaaactggtggtggatcgtattctcatacagggctgaacaaatgatttggcttggcttctgttttttctacgtcacggttttattgcgaaaataaatcttaaatggcaggctgatcaggaagcataaagaaatatcagaaatcatttggtcagatacgtaaactttctgcagggaggcatcgtgtaagcggtgcctccctgttttgatatgctttagcgaaacgagagcccccgactaggccggggagagtaaaagaaattatataatgaaaagaccttctggtagaataaagttgcggtcggtcaactgcaacaataaaaaaccaggaggtcttttctaagccttcggttctgccaggggacatgaccaattcaggaagcatgtttcccaaatggaacggtgccagcctttttaccagataaggtgtaaaaatgaattaacacttcaacatcccgtgaaatatgacacacatacacatatagaaagtaaattcaatagtttgagtaaagcctgcggtcccaaggaaggagactgaaatgagaaaagaaagtgcaatcattcgcaagtgctctgctcagagaacgggagagccgtttcattacgcctcaatccagcatattctttccaacgtcatgaatgcaggaattcttcgcagcggagaaacgaagtcagaggtgtttcctgagctgcagattgtttctttggaacaatttaatcgtgtggcaaagactcgtgagcagcgttccgtaaattatgcgataaagtgcggcggaaccaccgagacagtgcagctggaggatggcacggaagctaccgtcgttcgtccgccccgcgcctatcctcgaaagatcgtaggaaaagccctcttgtcaggcaatgtgtattgcggtcactgcggtggccgcatttttgcagctaccgctagaaaaacgcatcgtccaacagagagcaatgaacgtatcgcaatctataaatgctacaaccgctcacagcataaggggcagtgtgacgggccatccacctatcgtgccgagaaggtggataaggtaatcgaacagcttctgcggggaatttttgaacgagccaaaagggtcgatgagaaaaccattttaaaaatgctggtcgacgcttcagcggaacagtgtcagcaggagctgaaagccgcaaagctggaatataccaaggcgatgaaggaattgtccaggtggggagatttgatgctggactctctggatggcacttgtgtttttacgccggagcaggtgaaggccaggctggacgatgtgcaggcaaaagcggacgagatagcttatcagattcagcagctggaagagaagagccgccagatgaagcctgcggcagccgatcttctgagggagcatcaacagattctgacgtgggctgagttgttcgactccgctgcgataggggaaaagaaggtcattgcgtcctacctgatcaaggccgtcactttatcccgcggctatgggattcaggttgactttaacatctccgaggcgcaattcttgaatgggctggagatggggtgaggggtcgcgatgataacgcggtttctttccatgatgcaaaagcatgggatcactttagtttttcagacatccaatgggaaccacacaaacgccgtcgtgccggcgatacgcgtaatccccgattcccgtcagaaccataaggaaagaaggggacttcattttttccgtgtcgattttcttctgcatcgctttcaggctttttgccccttcttcgataagcttatcgccgccgagtttcatttcaatcaagccgtatttcccgtttctcaagtgaatgacagcatcacattcctgcccgtccttgtcgcggtagtgatacacctccccgttcagagcatccgcaaatacacgtagatccctcacgcaaagagtttcaaacagaaatccaaaggttttgagatcgttcaaaagatcggttggaccaaccccaagagccgctgctgcaatcgatggatctatataatatcgtgtgtcggacgagcgaatcgcagtctttgaccgaaggttcgggttccatgccggcatatcttctacaacgaagattttacgaagagcgtcgagataggaggctaccgtttcctcactgataggggattcgtcatttgcggcaatatcctgtgcgatgacggtgttcggtacctgcccaccttggtttcttgcataggagcgcataaggcgcttgactctttcaggatttttctgaacatggtctgcccggtttatatcggagtgtaccacagcatcatagtaatcgcgtgcctgatccagcgcgatttcatcgcgcatatcgatagcctgtggccagccgcctctgcatatgaggaatgccagacgatccaagctgaggttcgcagttccgtcgacctcttccgtattctcaaacagcacctttaagctgatatcccctgtagagtctccagactcatatagactcatgggccgcatggttagccaggtgaagcggcctgtgccggagtgtgttatttctttggtgtcggcaggaacagcagagcctgtaagaatgaactgtccaagttcaccgcggtggtctacctcaaaacgaacagtgtcccacagcttgggagccagctgccattcgtcgatcagtcttggcacggcgcctttcaagagccttttcgggttcagttcagacatggtgaggttctgttctttcttttcgggatcatccatatacaaaatgctggctgcgatctgttcggcggttgtggttttgccgcaccatttggggccttcgatgagaaccgcgcctttgccttccagcttacgcttcaatatgtcatcagcaactcgttttctgtagaccttcatttcgactccctcgattccgctttttctttagtatacaccgtattgtcagatattccaagagttttccgatgattggcggaaaattaattcgacgattggcggaatatttttccgatggttggcgaagagaagggttgatcgatgtagtagtcaagaaaagtagacacgaaaaatatttattttaattttactttttcaaaagtagacatgaggaacatttttacggaagttgttttttcaaaagtggacacggacaataatttttgccgaaatcccttttcaaaagtggacacgatgattcgaagccttgtaatgtccctgtttgcaagggatagcagttttggatagagtagagagacaaaatcaaaagtagacacggcacagagttatttttctgtatctttccgcttttgcacgaatttgggttcttcggtcaggatgcgctttgaaaaggtatctttcttttcaagctcacctcgatagaaacgcttgcagtagttatccggtgtgtcatagccgattgcaaagcagggacgctgccggttataaaaggcaacatagcggcacaggacatctttcacggcatctctcgtacggcattcttctaatcgaaaatcgatgaatagttcttcttttatccaaccgtttagagcctcattgacgggattgtccgttggtttacctgcccgcgacatggagcggacaacgttgcagtcctgaatcagttcgttgtacgcttttgaggaatacacagagccttggtcggtatggataatggttggttctttcttcccacgcagcagctcaacgacatccgcaagaccgtccagatactgctcccgcccaccacggcgttcagatagtttccatgtgagtatctgtttcgtaaacacatcaaagtagagtgtcagctcaagataaaatatccacggctttaataccgtcatatctgacacaatgacctggcgaggtcgatctacggtatcccaagttgtgaagataagatttggatacagatctcgtatctttctggggcgataatgtacttgatgcttggtttttgcttttattcccagaaaacgaaaggccttgtacacatagttatcgcttatattctgctgataattgactcgtataaaagccgctacccaacggtagccgtgggatggatgggccttatggacttcggagactaacgcgataacttcttcacgcttcagatcccgcgtactcttgtcccgtttcttccacttgtaatagccggaccgactgacgcccatgagagagcacagttcctgaacctcatagtctctggacagcagttctacgatttcgaattcttcggccttaaacgaatgaactcctgttccccagtatccgtcgtctgcacgacatagttttttttaagccgttcattctcaattcgcagcttgagtatctcacgcttgtaggattcctccgttcggtcaattccctccgggaggacatctttgatctcgctatctgcacgagccaaaccttccaagccgccctcatcatactgcttaatccacttctggaatgcaccggttgaaatgcggtttgcttcgcaaaagtcacgcattttgatacggtagttgcttttgtactgccggatcaggaattccttttccaacggattcaagtgtttagacataaagacgagctcccttccggtagaatactcacctttatgatactccacggacaggcttttttctacccttccgtgtccacttttataatagcatcagatagctcctgtttgttcaaaatcggagcagaagtgcgcgccgtccgatggaaaatatcgaacaatacgcatcctgtgccggttttgaacaatacgcatccattcccttccaaatgctcagtggatgcgttatgtcgcgttcgggagagcgctgcgttcgcaacgcagaggtcaagggttcgaatccctccgggtccaccaaatcagcacgatggttttgatacgaaaccatcgtgctttttctataatggttgcaattatcacagtaatttgatataatttatttgataaacttgaataaggaggacaagggatgtacataataggtttatttagaagaactgcactatgggctatgttattgaccattctcggttctatatccatgaggagtccagatatgctttatatgctggttattttaggtggggcatatttactttttgttttgatacatttactcgcttgcaaaataagcaagagcagtcgttcagctggagaatcttatgtatcagcactgggatatgatttggctgcaccattctcggagataggaacattcatagcagtcataaccaaaaagtggattatccatgatgattctaaatttcataactttatcgatggttttcaagttgttattggaggtatttgggccattattgtttggggaatagcgatattctttataatcaatatgttataaataggaggttaaaaaatgaaaagggaagaactaaaaaaacagattgatgaattaatgaaccagtatgctaacgaagaaattgatggtgatacttacgcacaaaagatgatggaattaaccacatctgctcgagacgaaatggatgaagattaacagaaaggtatactacgcaagcaaactgattcgcatagtttcatttcctgtagagagtttcactttttcccgcagagtttcactttgggtatgaaactttgtgaaaccgaattgaaacggagcaaaaatatcatactttgccataagttcaccgtaattctatcagaattacggtgaactttttctatgcccgaaaaccgcttgaaataaggcttttcggttgtttcagcacataagtgaaccccgctgcaggcaattctgcggcggggtttgtgcgttttatgtggattgagacttcatgtaccgtcataatcgttaagcggctgaggtaatcgttaaatcacagaggcattcgttaaattacagggataatcgttgaattagaagggaattaaaaaatcaaaacacgcgcaatctctgttcgcatagtttcatttttgggggaaaaacagcataacaggttgtgttcgcatggatttttaacccgtgattgtcatgctgcaccgccgttatacgcggaaaatcaccgattcatacgggcgcagattggggccggtgtagccgccctcgcggtcgtaggaggagagcagcacttcgccgttctgcggaacgagcgcggcggggattttcgacggctcggcggagaaattgtggaaagaaagcagagtttcaccgttatagctgcgctttagggcgaacagcgtatcggagccggtttccagaatttcgaggtcgccgcgtgagagcgcgggactacttttgcgcagtgcgatgagcgctttgtagcagctgaaaatggagtgcgggtcgtttttctggttttccacgttgatcttcgtgtagttcgggttgatgccgagccacggcttgcctgttgtgaagccggcgttttcggttgcgtcccactgcatcggcgtgcgggcgttgtcgcgggagatcatctgcgcctcttttaaggccacgtccggcgtgtcacccgccaaaatgtgctggtggtaggtgttttttgcatcggggtcgttgtaatcttcaatgtgcgggaagcgcatgttcgtcatgccaatctcttcaccctgatacacgaacggcgtgccgggcagggagtgcagcagcatcgcgagcattttggcggaaacctcccagtattccttgtcgttgccatagagtgagacttggcggggcttatcgtggttgctgaaaaaccgcgcccaccagccgtttttctttaaggcgtcgtagtcgttttgaatatcctgcttcatttttttcggcgaccacgtgttgatctcgacgatcggcgcgacgaacgggatggccatatcgaactcctcgcggtcggtgttgacgtagcgggcgagctcctcggcgtctttcgacgccacttcgcccacggtcatgacgttatatggcgagaacacgcggcggttcatgtcgcggatataggcgtgcgtgccggggcgaccgttgatgagactcgaactgaacgaatagccgtccggctgcggcggctctgcggaatccgggaaatcctgcggcttatcaaggtagctgatggcgtccactctaaagccgtccactccttttttcacccaccattccatcatggagaagatttcttcacgcagcgcggggtttgcccagttaaggtcgggctgctttttggagaacagatggtagtaatactgcccgcgctccggtacaaattcccacgcgctgccgccgaaaacggaggcccagttgttcggctccttgccgtttttcgggtcgcgccaaatgtagtagtcgctttttgggttatcgcgcgaggttttggattcgaggaaccacggatgctcgtcggaggaatggttcacgacgaggtccataatgaccttgatgccgcgcttgtggcactctgcacacagcgcgtcccaatcttccatggtgccgaactcgtccatgatctcccggtacccggagatgtcgtagccgttgtcgtcattcggcgagcggaacacgggcgagagccacagcgcgttgatgccgagcgccgaaaggtggtcaaggcggcttaaaatgccgggaatatcgccgataccgtctccgttagaatcctgaaagctgcgcgggtagacctgatacacgataagatccttcacccaatcttttttctgttccatacaactttacctcctgtgcaatatctgtatattgcgcaaagcggcctttcggccaagtatttttaccattataacacagtttacaagaatttgaaaagtatttgagaaaaatagtgaaaattgtgctttgaagtataaagggaaaagctgggcgcttagcttccaaacatgcgttaagttttctgttttatatagaaagcgaatcagggcgctgtcctgataacccacagccttttgaaaaaggctggcgaaaacttttaaccacgcttaccgaaagtttctgctcatcagccatagacattgccgtatatggtgagtccgtcgtaggcggcgggggaaccgacgatatgggttatctgcatggtgcttatcctcactgcggtgctcgtttgccggggtgaattcagagaagccggtggtaaaaatgccgaaacggtttcagtcgccgaaatgtacacttataagaatataggtgtatagaatggagacctataaaacagagtataagccacaggacaaaggatatagggtgaaaagaacggtgtgccgggtgcggcagaccgttctttaacctttttttcgggtgttgtagggcagtatagacaacatcggttcaaaataaatagaaacagtaaacataatattgataaaattagaatgaatagcggatgaaaacgaaatgtttgtaattgaaactattgaaaatgcccataaatcgcagatttatgcgctttgaaatatcaaagtgtacaaaagcatacaagtgcattaaaattacataattttaaaatgggaaaccgctttcatattgctccctaaaatgcacttttttgtcgtatatggcattataaaagtaaaattattaaaaaatatttggagaaaatactgaaaagtttttgaaaacttattgacaaatcgtgaacgcagtgctattctatgtacagaaaaaccgagaacggaattaaaatttagttatttttcacttggttctacagtttaaagctatttattagcgttggtcttcggctatggagcaatagaccgatgctatcgcagcgtttgaatgttctaaataccgccgctttcagcggaatgcacacatcgccgtaccggatgctaaaaggcgagcgtgtggggaaaggtacatcagtgaacggacaagcgctgtaagataaatagggggtcatgaattttgcgaagcaaagttcatggcgggattcctacaaattttgcgatttgcaggaattcaaaacaccggggatcacaaagtggggtatgctttgtgacctcaacacattatgaaccgcaggttcacaaaacaagagaggtattgtattatgaagaaaaagaccttagctattcttctgtcggcggccatgctcgtcaccggcatcctgagcggctgcggtggcggcggcaacacaagcagtgcagcatcctccggctccaccgacagcaccagcagcgccgcgggtgagtcttctgcttccgaatctaccggctccggcacgaatgccgccgcaggtcaggttacggcggttggcacgaaccgtgacgaaactctgatcgttgagactgcgtctccgaccgacactccgggccagttcaacagctacatgtccggtacgaacatgaacttcggtattcatcagctgatgagcgcacacctttgggaaatggacaccgtttccggtgagcagttccctgaaattgcagccgatatgggcaccccgaacgaagactttaccgaatggaccgttaagatccgcgaaggcatcaagtggtccgacggtgaagacctgaacgctgacgacgttgtcttcacgttcaacatgatcaaagaaaacgataagatcggtggttccgcagcgaccaacctctacatcgataaggttgagaaggttgacgattacaccgttaagttcacgatgaaggaatccttcccgcgctttacacagcgttacggcatcaccgtatggggcaccgattaccgcatcgttcctgagcacatttactcccagcaggctgacgttacgacctataaggacgagcagccggttgtagcaggcccgtacaccgtagaagactatgaccccaacggcgactggatcctctacaagctccgtgacgactggaaagaaagtacgcttggcgttgtaggcacagagcactacaactacagcgaagatcaggttccggcagaatatgtttggttccgttatcttggcgactcctcctccagacagatgcagatggtcagcaacgaagttgatatcctctgcgaagttacgatggaagagctgcaggcaatgcagagctctaacgacaagatcaacgcatggtacaacgagttcccgtatgcaaacatggacgacccgggcgcaaagggcctggtgttctctcagggtcagggcgctccgtacgacaaccctgacttccgctgggctatcgttctggcactggatatcgaccagatctccatgaacatcttctccggcgcaggccgtgcggccccgatcccgctgatgaacaacacgaagtatctgcaggacacctacaccatcccgatgcaggaatggcttgagaactttgagcttgaccttggcgatggcaccaccattaagccgtacgacaccggctatgcaaagcgcatggcggagaagaccggcgtaaccggcaccgacgaagagctcatcgatatgttcggcgcaggctggtggaagcacgatccggaagcagctgaaaagctcctcatcaaagccggctttgagaagaaggacgacggctggtacttcaatggttccaagttcacaactgaaatcagctaccttgctaatacagaagctcagtccgctcgcggcgctcaggctgcttacaaccagctgcaggcgttcggcctcgattgcaccattacttccaagagtactgctacttgggacgctgacggtggtcagggcaactaccagatcggcacttactggccgtccgctggtattctgaaggacttctactccgctatcagcggttgggacagccgtctcattaagccgctcggcgagcccagtgccggtcagggcgcacgttggaagaatgagactgttgataacatcctcactgagcttgcgaacaccgacccgaccagcgacagatcctatgagctgcatcaggaattcctgaaggaagctgttaaggaaatgccggcaatcaacttcctcagcggtacaaagttcgttccgaccaacagcacatattgggaaggctacccgaacgccgagaacgcatatgacggtccgtggtggtggtggagccgcttcaagtatgacctgccgttcattcagccggttcagggctaatttgatagcttgaatacttggagagaatccaatagcactaatctgaaatgatctgaagaggatgagggcgtgtgccgaatacccatgaccacgtccgtcatcctctttctcatttccccaaatatcctgttgtaatttgtctataagataaggaagtgtggctgtgaaattcaaaacattctttttacagcgtatccttgcgtgggcgttgacgatcttgatcggcgttacgttcatcttcttcatcccgcgtatgttcccttccgatcctgttgagaacatgatcgcccagatgcaatcccgttccggcaacatggatccgagagaaatggaagcgctacgtcaacaacttagaattcaattcggtctcgatggtactcttcttgagcagtatggctacttcctgctgcatggccttttgcagtttgactttggcccgtctttgatgagctatccggagccggttacctctattatcggtcgtaacctgccgtacaccctcggtttgtccctgaccaccacgctgcttgcatggatcatcggcaacttcatcggtttgcttgcaggtttccgcaagaacaagacatcctctaaaatcctcgaaggcatcgcgatctgtatttacccgatcccgtacttcctggtcgctcttgttctgcagattgtcttcgcgttcgtcctcggctggttcccaatccagacaacgctgcttacccgcggcacgttcgcacagtggctcggttcgcttctgaaagcgtctgttctgccgggtatctccatgcttctgctcggcacaggctggtggattatctctatgaagtcccttgccggcacgactgcagaagaagacttcgttttatatgcacgttaccgcggcatttccgaagcgaagatcggtgcgagctacgttttccgtaactccatcctgacccagattacggctttggccatgagccttggcggcgtcttcggcggttccatcatgacagaaatcatcttcggttacccgggtgtcggtacgctgatccaaaatgcgattttgcagtccgattacaacatgatcctcggatgtatcacgatttccatcgtggcgatttccacggcgacgttggttgttgaccttatatatccgttcatcgacccgagaattcgttacggttgataaggagggaagttgtaatgaaaaaatttgcaaaattttggaaagcagccaacttccgcctgaagttcggtcttatcgtgaccctgatattctttatcatcggtttcgttgtttactatgtaccgcacgtgaacccgttcacgttcaatacctacccgaataagctgggtgcttccgcagaacactggctgggcactaccagtatgggtcaggacgttgtgtggctgctgattgaagctatccacaactcgctcgtcatcggtctcatcgtggcattcctcggcacggttgtcggtgtttttgtcggtctgctttccgcttttgccggtggccttttagaccgcgtgctgatgattgttacggatacgttcgttgttattccgtctctgccgatcctcatcatgatgacctccctgatgaagggcagctccaccacgatcgtgatggctcttgtgcttgccatgttcgcatgggcttggccgagccgccagattcgttccatggcgctgagcattaaagagcgcgactttatccacacggcgaagttctccggtgaaagcacggtgcagatcgttgtgaccgagattctgccgtatgcgctgacctggtcgctctccaactttatgaacgctacgctttccgctatcggttccgagtcgagccttgctgttctgggtctttcccctggcaaccttgtctccctcggcaacatgattcagtgggcaagaagctacaacgcaattttcaacaagcagtatctctggatcggcgcaccgatcgttgcaacggttattctgtttgtcggcctgttcttactcattacgggctataacgattacttatccatgaagagaggcaggtaacgaatatgttaaaagtcgaaaatctgtccacttcttacaagctcatcgacggtgacgttcacgtccttaacgacctgaactttgagatccacgataacgagatattcggcatcgccggtgaatccggctgcggcaagaccacactgctgaagaccctctacgatattatcgagttcccgctggagatcgacaaaggtaaggttatcctcagcggcgaaaagaatggacaatccttttcttatgaatccggaaacattcagaagacctggtggaacaacatttcttacgttccgcaggctgcgcagagcgttctgaacccgatcgttcgcctgaaaaagcagtttttggattctatcccgcaggaagaccgcaagaacgaaacgaaagagcagaccctcgcacgtgttgcaaaatacctcgaggaactgaatctttccccggatattttggaatcttatccgttccagctttccggcggtatgcgccagcgtgttatcatcgcgcttgcgacctttatgtccccgaatgtcgtgcttgccgacgaaccaaccaccgctctggacgttgttgtgcagaagggtattttgaagatgctgatgcgcttgcagaagcaactcaagaacaccatggtcatcgtcagccacgatatgggcgtgcattatcagattacggaccgcatggcgatcatgtattccggcaacatcatcgagcttggcccgaccgatgcgatctttaatgacccgatccatccgtacacgaagatgctggttgactccctgccgcgcgttggcgataagagccagaaggtcggtattccgggtcgtccgccggcactgaagaacccgcctccgggatgccgtttcgcagcacgctgcccgcatgctacggatcattgccgtcaggagattccggagttcattgaagttaagccgggccgctttgcagcctgccatttgctgaagaaggagggagagaagaatggctgataaattgcttgaaatcaagggcgtcagcaaaatcttccgcgtaggcggtatgattcgtggcaaaaagcttgttgcggttgacgacgttacgctttccatcgacaacgataagccggtcatcctctccgtcgttggcgaatccggttgcggcaagtccacactgtgtaagatggttctgcgtctgcacaacccggatatgggcgacatcgtgctggacggcaaatcttaccgcgataagaaaagctacaacgcaaagcagttcaagctggacgtgcagccgattttccagaacccgtatgagtctttctccgcacgtaagccggtagactcttacctgttcaacacggcgctgcgccttggcattgcgaaaaataaagcagaagctacaaaccttgtagatgacgccctgaagagcgtcggtctctctctggcggtcgtaaagggcaaataccccacccagttctccggcggcgagctgcagcgtgtttccattgcacgtgcgcttatcacccgtccgaagctgatcattgccgacgaaccggttgcggctatcgatgcttccatgaaaatgaacatcgtcaacctgttcaaggagctgaaggataagtacaaggtctcctttatctacatcacccatgacctttccacggcgtactatgtatccgattacattgcaacgctgtaccgcggctgtctcattgagtacggcccggccaaggagatcatggacgagcctgcacacccgtacacggagcttttgatgagcgctgtgccgcgtatcggcgacaagtgggcggatgacgacatggcgttgccggatatggagtctaaggaatattccatcacctactgcaagttcgcaccgcgctgcccctatgcgacggacgaatgcagaaagtcgcgcccgggcgaaacctatctgaacgatgtcagaaaggtcatgtgcttccacccgctgattcagccgaagaagtaaagcctctgcgcacaacaaaataaacaagctacacttgccgatcccctgaaggcccatgaagccgacatttcttccgtcattgctttatgggcatcagggggtcaatttttgctttgtgggcgtgctttaaaacggttgaaaacatgtcgggattgttataaaaagagggtaaattcggcggaataaggattgaagtttgtcgcgaaatacggtatactgattcacaagcggcactgcggggtttgcgggccgaattttagagttttggggagaaagtacaatgaaaacgaagacgcgatttgcgtggaaacaatttctgaaaaatcttgcaatcatctcgatcccggtggctttgcagaacatgctgacgacaaccggcagcatgatcgacaccatgatgatcgcgccgctgggcgaaacgaccgtgggcgcggtgggcctttgcgcacagttttcctcgctgatgtttgcgggctactggggctttttcggcggcggcatgctgtttttctcgcagtattggggcgcgcaggatgacgacggcatcgaccgttcctacggcctgacgctgacctgcatgatgatcgtggggcttacattcggcgcctttgcgatttttgcgccggaaaccgtgatgaaactctatacggataaggagagcattcaggtgattggcgcggaatatctgcgcatcatcggcttcggttaccccgtgcaggtgttttccatggcgatgagcgctctgctgcgttctacggagcgcgtgcgcattccgctgtttgcgtcaatcgcctcggtagcatcgaatatttttcttaactgggtgttcatttacggaaagttcggcttgccggagatgggcgtgcgcggcgcggcgctggcaacatccttggcggcggttatcaacgttttggtcattttgattttggcgcgtgcgcagaagtacccgtatctgttccactttaaaaagcatttccgctggaataagaagcaggtgaaaatctactttgtcaagtgcttccccatcatctgcaacgaagtgctcatcggcgtgggcaacatggttatcaacgttgttttgggcagacagtccgaacaggccattgcggccatcgcggtgttccgcacgctggagggcatggtcatcagcttctttgccggtttctcaaatgcggcttccgttttggtcggcacatgcgtgggctccggcgagttggacgcagcctacgagcgcgcaaaacgccttgtgttcctgtgcggcagcacgattttatgcgtatgtctggtgctgctcggtatccacaagccgctgctttccgcgatgagtctttccggcgaatcaatggagatcggttcgcacatgctgatgatttactgcgtggcggcggttattcgcatgtgcaactgggtgcagaacgatacgtatagagccgcgggcgacgcggcgttcggcacaatccgcgaaatcgcgtttatgtacgcgatggtgctgccgctggtgtgcctgacgggccttgtgtggaaagcgccgttccttatcgtgtttgcgtgctgctatatcgacgagccgatccgtctcattttgatgcagcggcacatgtactccggcaaatgggtgcgccccgttacgccgcagggcatggaagcgttgccggcgtttatggaaaagcatggacgtcataagaaggcggcgtaaacaacttaaagacagcaaaaaggacttccaaaaagaagtccttttttcgtgtgtatgaacgaaggcggatagcagccgccgttctgtgcccagccgcagtcgagctgcgagtagcactttgcgctgttgtcaagcagcgtgggcccgaggccgagatagctcgcgatgccgccgaaagaatatgtaccgatattgactttcatgtaaacttccccaatcgtaacaaatttataaaaaataaattcacatatcaagtaaaatcatactatatacacaaataagcgtcaatcgaaattatggggagcgatggaaaatttgcaggctattttatggcgaaattgtcggggacaacgcaatttttcggaaatttcggcgtgtcggcggtttcataccacgctttgtagaccgggatgagctctgttagggtgattttttccgggcggtcgaggaaaccaagtaaatttgccatgcggccgaggagctcttcaggcgtgaaacgcgtgcgcagaacgccgatgtcgaggtcgcgctcgcgcttacttaaacggcggccgtcgcgattgacgagcagcggaatgtgcccgtagtgcggcggtgtgtggccgagtgcgtgaaagagctgaatttggcagccggtggaagggagcaagtcacgcccgcggacgacttccgtcacgcccattaaagcatcgtctacggtgacggcgagctggtacgcgtgcacgccgtcgctgcggcgcacgatgaaatcgccgaacgtggactgaacatttatattttgcgggccgcagtatagatcttcaaacgtgacggtgttctccggtgctcgaaaacgcaagcttgggcggcgcgtgcggcttttttcttcggcttcggcgggcgtcaaatttcggcataaaccggggtagcggaacgtgccatcgcccgcatggggtgcggagaccgcgtgcagctccgcgcgggtgcaaaagcatgggtaaacatcgtttttggcgcggagttcacttaatgccgattcgtatagctcgcggcgcgcgctttggcagtagggggcgtgggtgcgctcgtggccggggccttcgtcccaagtgaggccgagccatgttagatcgtccattaaaagctcggctttttcgcgtgtgcagcggtcggggtcgaggtcttcgatgcgcaggagcatctcgccgttttggctgcgcacggaaagccacgcaagaagcgcgcagcagaggttgccaaggtgcatgcgccccgaggggctgggcgcgaaccgcccgcggacaggggtaggttgtgaggtggacatactaaaaatcctttcggagaaaatttaaaattataaaatcattttaccgcagattttgggcgcgcgcaacggttttgggacggagaagtgaattgacaggtgtgcaccaaacgggtaaaatgatatagcaaagttttgcacagcccgcagcaacggcggttaaaagtttcgcccgccttttcaaaggcggcggaatccaaggacagcgcccttggtcgagctccgcagagctcgaaactctttagactttagaataagaggatatcaaaatgaacgaaaaagaaatctcggaaattcgccgccgattcagggcggataaaagcaatatcacccatgtgcgcgggtgctacgtcaacgaaaagcaggaaatcgtctcgcaattcgaccagccgctctccctgctgccgcaggaggaatgcgaaaatatgctttccgtgctgcgccgtacgctttccggcacgctcggcaaaaatctcatcgaaatgtcgtttacgactgcgcaggtcattgacagcgatgagcaccggctgctgatggcgctgcgcgactcaaagcttaccgatgaagaagccgtacagatgttttttgagaaagtcatcgcatcatacagacccgagggcacgtatctcattttgctcgcgaacgatacatacgatgtgccgtaccgcgcaaaggacggcgaaacgctggaggacgcctcggagaatatctataattatgttctgtgtaccatctgccccgtgaagcagacaaagcccgttttggggtacgatgtgccggaaaatacgttccataaccgcgacatcgattggctcgtttccgcgccgcagctgggctttttgttcccgtcgttcaccgaccgcagcgccgatatttacagcgccatgtactactgccgcagcgcttcggaaagctacgatgaatttatagacgcggtgttcaaccgcgaagcgcccatgcccgcagaggagcagaaaacgacgtttggcacgattttgggcgatgccttaaatgacgcgtgcagtttagacgtcgtacagaccgtgcacagccgcctttgcgggatgattgaggagcacaaggcgagcaaggacccggagccgctgaccattacgggacgcacgatgaaaacgatactgaccgcttgcggcgtgccgggcgagaaagccgaaaagtttgaggaagcctgcgcggagcagttcggcgcggacgcggcactcagcccacgcaaccttgtggagacgaagaaattcgagatcgaaacgccggaggtgcaaattcgcgttgaccccgagtacagcgagtggatcgagacgcgctacattgacggtgcaccgtacatcctcattcccgccggcgcgggcgtgcaggtgaacggcgtgccgatcgccatcactcgcccggacgtggagtatgaggagaaagaatgatggaattcaaagaactgaatatggacgttttaaaatcgatcttgaacgcatccgtatgaggtgattttttgtgaccgtgcgcgacgacgagggtaaggtcatcggctgcttcgagcgccacgaaatgcactgggatttcagcgaccccggtaagtctgttgcggtgccgaagccggaagcaggatattaagacaaaacaagcggcgcacagggtgtgaaaacgctgtgcgccgctgattttatgtgcttttaaatttgctcgaaatcagcgttcatgaagagctcgagtattttgaccgtcgcttcgatgtccttttggctcacgatggcgttcgggccgtgggtgtagcgggtgacgaccgagaagccaattgttttgatgccgccgccgacgagcgtcatggcgcctgcgtccgtgccgccgacatagatgacgtctttctggtacggaacgttgtgttctttgcacagcgcgatggatttattcacaaggccttcgtcgctgatggaaccggtgtcggagattttgatggcgacgccgtggtcgagcgcgttgctgccctccaaatcgcccgggcggtcgtggcacggggtgacgtccaccgcgacgccgatgtccggctgaatacgctgcgccgtgacctgcccgccgcgcgtgccgacctcctcctgcacggtgaacgcgaggtagatgtcgttcttcggatttttcacgttcatcatcgccgccagcagcatatagcagccgacgcggtcgtcgatggcctttgcggtgatgtagcccggcgcaagctccgtgtacgggccctcatagcatgcaacgtcgccgacatcaacgtattttaaaacttcttccttgctgtgcagaccgatgtcgatgtagcaatcggtataacgcttatagccgccggcgctcagcttttccggcgggatgcggcttgcgaccacgccaaccacgccgttgcggaagcggacgcggctctggtacgttgtaaacgtccagcagcagccgagctccttaaacataatgcggccgtcttcctcgattttaatgacctgaaagccgatctcatcggtgtgggcggcaagctctatgcgctttttgtgctcgcccgtgcccttaaaataggcgatgacgctgccgtttgggtcggtggtaatgtcgtcagcaagcggggctaacttttctttaatatagtctgcaacggcggtctcgtagccgctgacgccgtgcagctgggtgagttcttcaaataacttcatacgggttttcctcctctaaacggggcagaaagccgtagtccggcgttattctgccatggcggacgcaatgtctttgcagagtgcgtccacgttttcgtccgtcgtcgcccagcttgtacaaaggcggacggcgctgtgtgtttcgtccacgcgcgcccaataggaatacttgtacttttccgcgagcttttcgagcgcagtatccgggaaaatggggaactgctggttcgtcggcgagggggcaaagaatgcgcagcccgcatcttcgcacgcttttgcaatgcgctttgcctgccgcacggctttttcgctgatcttgaaataaagatcgtccgtgaaaagctcgtcaaactgaataccgagcagacggcccttagccagcatgccgccgcgctgcttgttacagtgtaagacacacgccgtaggtgatattcatctgttctcagtggattgcaccgtgagggagcgacctcatatcttttttataggtgcaaaccgttctgccagattcacttttctgtgttgttgtcatcactttttaagagtgctgtcagtattgcagaatagtggaaccgctggatatagtgatggcaattctattgaaatttgccatcacagcaccgtcaaaagtagggataagtgtaaccttagaagctgtcgaggaaatcaagcattgcttcttcgctttcggcgttgttttctttttcaaccggcggtatttgtgcaggcggtgtctgcacaaactgtaataagccgccaagaggattgacttttaccatttcctctcggatagtggtgataaccctttcaagaaaagcatcttcatctgctttagttttggacagctctatatatccacagatggcagaaatgaccgccttgctgtatgaagcctctgcgttttgcagatactcataagccttgcggtcattttccttatctaaattaaagcggacttttacattcttaatgctcataccgcaccaccttttctgttaagagtcacgagcgccatatactcatatccttttgcggtggcacaaatatcttcgttaataatgacacggtttgcatcataatcagcaaagttgcggataaggcaaccaccgccgcctaccacatagagcctcattagtttgggatcgtattcgtgttcacgcagacggcggaagataccggcggtgtattccttggcggtcttgataaccgtttcaagatactgaccgtcaatatctgccgtaccctttttgagaatttctgtaaccatagcatcatcaagagttgtatggtagtgcttcatcatatgctcacggataagcaaagcacattgatttgtgccgtatttctcggtaaacatacgctgtgcgtcgggctttttgtttactatccgaagcaggttcattgttccgttgccgatatcgcagagcatattgacacccttaaaatcaccgagccgttccgcaacggcagcaaagccctgcggataaatttctgcaccgacaatcttaatgtggtattcggtcttgcggaaagtaaaactgacatcactgtgctgaagcagatatttcttaaactctgccttttgctcacttacccaagttaggggcagtcctgcggcgatgaacacggtggcttcggtgatgcgttctctccgtagctcccgtgcgatagcggcaagggtgaggacataataatcctcatcgataaacttgtccgccgtaaattccttgtgaccgacaccgatggaatagtatttaccgttccaatggagtaggtcgctgacaaaagtgggttcggtatcgcttttcattattccggtgggaaagcagcagtttgccgttttcatattcccatacccgtggtcgataccgataacaaccatttcattaaattgcttcattttacatttctcctcttctcatttcagtttgttgtgctttttgatttgtttgtacagttccttatcggcgggtagtacggcatttttgaaatagttacagtaaattcccgaataactgataagctgtacacatttgtgcggttccccgtcatctaaaagaatgcagttgccacgatcgtagcaactgcatagacggcgtaccaatttgtttacccgtccaagctgcgacggatggattttccaagccattgaattttcctcctttttcttgtttcggggcataaaaataacacctaccgattgttcaggggtaggtgttatcaaatgattttttcgtcctcaaagccaaaatcttcgccggtgaacttttcataagccaagccgattttgcgaatacgcttcagaacgccgctgtgatttttgtagccgagtttttccgcaatctcttccagcgtagcctcgtccattcgcatttcgaggattttcatatccttttcgcttagtgttttcttaaattgctccaccagagcctgtgagactatgttttcctccacatcctgagatgtgtccgcttcttcccactcctgaccgttatggctctcggtataagtttcctgaaactcttcaagagaaaccatcgggtgcttggtacgggtgtgataccacttgcggtaaaaatccgttttctgccgactgttccgcaaatcgaaatcctcgaagcatctaaactcctccgccacttgaatagcggcgttcatattatgctttttcattacctttggtacgatataccgcagataaatatcgatttcttcttcgggaacaaaccctaaatcacagttatagttttgatacagttctttgacggttggtataatgccctcatcagtcatctccttaatccaataatcagggcaatgtgcaagcttccaggaaggatcgtaaccggaatagatttccatatactcgtcaaatcccatatgatgccataccatatatgctgttgcatcaataatcagaagcttgaacaaatcgctttctataaactcgcacgcttcacggtttgcaaaaaccatacggggattgcgtgaaatcgagtttagctctgcaccgcatttttgtaaaatgcttcttgggataaaatagtaaaacggaagatactccgagttgcgaaacggcgtgaccgaaccgtccagtcttttcaatttgaatggcatttttttcgcctcctttccagaggaacgtcctctatttattattcgacacaggtaacaatgaattgttcctacttttcgaaaataattatatcatattttagtgtccgataaaactcccccttttagattggaatgaagatattcggcaaaccagtgtagggaaaactggttctctcaaatatcctgtgcaacagtattggagaaatccgagtgttatctctgatttctgttgaaatttggcgtattctgtaatataatctacttataatgttgtgtgctaattgctaatgctaattgctaattgcgaactatggaggtttcactatgtcggtaagctacaaacggttatggcatcttctcattgacaaagatatgaagaaaaaagatctaattgaacaagcccatatcagcgattacacgatcagaaagctcaaccgtggcgacaatgtgacaacggatgttttggtgaggatttgtcatgcgctggactgccagattgaagatattatggaagtcttgccagaagaaaagtcactttaattcaaaatttatgctgagtaataacagaaacgaggaaatgatatgggggaatatacgcgcttcctgtctgcaaagggctatgaaatatcgccggaggacgataactacaagcaggaacttcttgatgttgcaaaatctttccggacatttgatgcgtcgttggacgagtttatcgtgcagaagggctattccgacgatattgcggacacagatgcaaaagtcaaatatataaaagataaatttgatgaagctgggctctcagtggaatctcggattttaaaaagctggtttcagaagcacacgcaggcaggtaatcgagacattgcaattaaattctgctttgcttttcaactgacgctggaggaaacgcaggatttcttccgccgtgtatatttgcaacggaacttagattgccacaatattcaggaagccatttactactattgcatcagccaccggctgacatattctgaagcgcaggcgctgattgaaaaagcaccgacacaggacgggaaaggtcatatcgacttgaattccaatattctgtatattcaccgtgaagaaattccaaagtttgttttccggctggttgattatatttcggaagtaaaagaatggcgaggcacggcaacgcaacttataacgcagatgaacgaaaccgaggttacaccgaatgtcgtgaccaaaatgcttgcccgattttcttcggaagtttttcagccgcaaggcatcgagtacaaaacaaaacgcacaggcacaagccgactgatttacttaaaaaagtgtgacggcaatgacagcgatgacaataaatccactatataggaaaagccgtcacagccgtcactatcgtcactttttgagaaaccggatatatggctatacaggtaatgccaacccgtaaggatagcgagcataggttttgtgttgcctttgaaacccacaaaaccggcggcaaaatgccgaaagggacttgccgcccctgtaaccccgatttttaggagaaaggaataaaaatatatgagacaaagaacaactgcaatcaatatccgagtgactgagggagaaaaaagaaaaatggaaactgccgctaaaaaatgcggactttcgctctctgcttaccttagaaaacttggtcttggcaaggaagttcaggcaaccttgccgcaggaattttacgaagcttaccgaggtttgacctcacttcgtgacaattggaagtcgctttccgaagccaatataaatgcaaacttcaacgatgttgtgagcaaattattgaaggcttaccactcaatcggtgagccggaaagtgcaagtgattcaccgtggcagtaacaaaaacatgggctataaccgacagcgtcagccgtgttttgagctatgcggcgaacccggacaagacgatttacagcgatatttgcaaggtacttcactacgcaagcgacgagagaaaaaccgtaatcggtgaagaaaaagcaatgtatgtgacaggcgtaaactttaccgcagaaacagcttttgccgagatgaaagcggtacaagaacgcttcgataagacggtcggcaatgtggcttatcacgcatatcagagtttcaaaacaggcgaagttacacctcagcttgcacacaaactcggcgtagagcttgcaaaaagaatgtggggcgatcagtaccaagtgctggtcgctacgcactttaacactggcacatatcacaatcatttggtcattaattcggtgaatatgtggaacggtaagaagtttaactgcaacgagggagcatactggaaactgcgcagtatttccgatgagctttgcaaagaaaacggtttgacggtcattaaaaatcctaaaggaaagacgccacgcaagatgtactttgcggaaaagaacggcgagcctacccgatacaatttaatgcgtggggcgatagataaagcgcttacgatgagtacaaatcccaaagcttttacctatgttatgaaacagctcggatatgtaatcgaccttaacccatataataagtacgccaccatccgctctgtcaacagcaaaaaagcgactcgtttgtaccgcttgggagaagcctatgaccgtgacgcaatctatgaccgaatgagagatacactgaaaaacaacccacaggaagcttaccgcttatactatgagtttaccgaaaaaaagagcttcggtgtaacaattcaaaaggcgcattttgttaaaggcaacttaaaaaccgccaaaaagattacgggtcttaaagcgttgtatttcagatatttatatctgctcggcgtacttcctaagaataaaaaacgcaagccgttatcgcccgaaatgcgtgaagcctgccgttggctggaccgccaaaccgcacaggtgcagcttattttcgacaaccgcttaaccgatatttcctctgtggaagtatttataaaaaacgcagattcggaaataaaactcatatcggattaccgcaaaatgctctaccgagatattgattcttgtcacgataccgacgaaaaaacaaagcttgttgccaagcgaaatgactgcacaaaggctctggctcagctccgaaaggacaggaaaacagcggcaaggattatagaggataaccccaaaatcaaagaaaatattctcattgaggagaatatgcgaagccgatatttcggacttaataaatcaagaaagagaggatacgaacgatgacaaaacgaaaatcagattttactttaccgactctggatgacctgtttacaacgcaggctgagcgtgacgacgcaaagcttgagcgtgtgcagaacatacctcttgacaaacttcacccttttaagaatcatccctttaagatattgaataacgaagaaatggagagaatgattgaaagcatacgcaaagtcggcacaataactccggcacttgcacgacctctgcctgacggtggatacgagcttatttcggggcacagaaggcttgcggcgtgtcaggtactcggatttgaaaccatgccggttatcgtccgtgagatgtccgacgacgaagcggtaatcgcaatggtggacgccaatctgcaaagagaaacaatactgccaagcgaaaaagcctttgcgtataagatgaagctggaagcgataaaacatcagggcgttacttctcgccaagttggcgagaagttgttgagtgtaacacaagtaagcaaagacagcgatgatagtgagcgacaaatccaacgctatatccgcttaacttacttaattcccgaactgctttcaatggtagatgacaatggactgataagaaaggcgatcataagccatgcaagacccggcaaaaatcctgcgacaaagaacagcaccaatgccgccagaaagatgatcccagaaagaatcccaagtaccgcaccggaaagaaccactaaaaatttacataccagataaagaatccccgtaaccagcataaagggaagtgccagtaatttacctatcaaacgcatacgctttgcctcctttcagaagggcatctgcccttataaaaattttaccgtgacggcaaaaagaaagcaacggctttccggctgtttatgaaatgtttgcaaatccccggatcagtttgtccatgccatcccaaaggctgtccagacgggtgcggatgtcatctatatctgcggcataaatattgccggtctcattggcccgtctggtatattggtttaagttattggaacaaatgcggagaagccggatcatttcctgaatatctcccatatcaaggtggatgatgtaaccgtctacggccatctttcgcagatatgccgacaggttggtaatgccaagttccgccatgcgttcttttaccagttcggcctccgcttcggacatgacaaattcgacgcggacggattttttgttatgcccgccattcatcgttccaaccctcttttatgagatgagacctcctgcgtcgaaaccgccgtctttgctcttttgagtttttcccgcagggtggtcttttccagcttatcaagatattcctccagatttccggctgtcgcatgatagctgcgtttgaggcgttcccgttttagaattatcatcagctccggctcattttctggcagataagtcattgttttaggggctccatgctctggcataagccggttcataaattgtctccgttcctgatagggaatcgtgataacatttccatcctcaaaagcaacggctacatttccgattggacaggtcaattttttcatccgttccacatgttctctataatttagcggatagagatcgccaaatatttttccgtccctgacttctttcaaagagatggcataagccaaaacgggatcatttgtctgctcctggtaaaaccgccacactttgttttcatggctgccctccagataaacttcccgttcgcgcagggtataggttccgcaagggcgtgacatccaaagaagctgtttatcctctgaacgctctgacacagccagttttgagatcagttccttatccaggtcaaagtcctctttataatgttgggtattgaggcaatcttatgtccctgctgggtaagtcttgccgcaaagaccatgtttttttctgcttccgctaccgcctggcagttcaaaatttttacttcaatctgtttaattggtatgtccctcctttacaatcgctttcagtaagaacagatagttaagactgtctgtgatcttttcgtcccatgtgtccatcggataaactgtttcctcggcaaagcacatatcgtatagagaaacaatatgctttgccagcataccggcaagggcacgctggggcgttgtgtgctgtaaagttgccgctgccttaaatgcacccagccggtccggatcatccccggtgtattctttggttttctgtttcaaggtatcagcacagagccgcacctgttcgtcaaaaacggcattgacttcattttgcgtaatatagcatccctcctttgaaaacaagaaaccggctattctaaagcatcttagaatagccggcaaataaatggatatgtaattgtttatagtgtattgatctctttttccagttcctggaccgctgctatgactgtctcaaatgtcggaatatccccatacaacatatcctgcatagagttatagtccgtttccaatgctgcgaaccgatattccggcgggagtaattttaatgtgcccggcacagcctccgggtacttcgcccatgctctgggatagaatttcattttgaaatctacaactttcttcaggagatccagcctggaaaaagcagcttctttgaccggtgttgcagccatgcggtagagatcataataatgtctggaataccgctgcggcatttccaaatgttccggtctgttcgcttcatggtgcaggattgtggctttttcccagaaggtccgttccggggcaacggtaaggattgcggtttctttttgctcaaaaatcttcggataatattttgccgcgtatggttcgatcagcgctgtttttgcaggagtccacgctgccagcgcaccaatctctaaacggatcacctgtaaagtcgccgtattcgtaaaaaggtgcggataggcgaaaatgaccgtctgtttatccttttcatctatgtagacatttgcttcacaaccgatttcctgggataagccggctttgactgccgggcagaatgtttcggacagaaatacctctgcacgcacattggcttctttgttaaaagcatcctgttttgtattggaacgtttctcccatggttcatctttgccatatcccaatacacgccagtccagaatcaaatcaatatcttctgaaaaccggctgatcaggtgaaaggcttttgaaaggctggtacctcccttaaaggtgatggactctttccatggtgagcggtgaaataaataatccagcgtaaaacatacccaaaagtctttttccacgatggcatcattcagccccattttatctgctgtatttctgaacagctccctgcggtcgttatctgaaagtcttgctatatttctcattgtaccttttcacctccacaaatctgccgtatcgtatcgtaaacccaatccgtagactcggttgcttccttcaaacaagcctgtttatccttgtctgtcagtttttcggaaagcatctgtatgacttctggcgtaacattcgatctgccaagcgtttttaatgcctgtataaccaaacttgtcatataggacaatccggtaatctccttattggtccggtgcttaaattccagctttgtagagttccactcgtaggtcttatatggaccatcgctgatataggaccatactgctgttacctgtgttgaaagacctaacaggttcaatgctgtattcccacatggggcaatcgtccagtgataacttcgtgccaatgcgttcgccaccgcttccgggtctgccgccacatattcatccagaagtttgctatattttggtttttcataaactcctttcaaaatacggcgcaatgttcctgattgcactaaacggcttaaactttgacgaatagtggatgtatctgcaatatccgcaaaatcagacatcacaaaaacagttccatcttcaagagaaagaacacgctctcgtattcgttttgtatatccgttgtccacaataccgcctcccttcatgtcacgaatattatatattattcgtgacatgattgcaataggtcctattcctcttattttgagtgttcccattaaaaatctgatttatacatcaaaaatcaaaaattttgcaaggcagtacagttttcatatatgtcacatattttatatattattcgtgacatcaggcagttggcaggtagatccagtcgtgcatcaggcacacgctgggttcatcctccctgggaaccagacggtaggtacattccccatagaccgtgcgtttgtcctcgatctccatgccataggctttataaaagcggtattccagattggagataatacagcgcagggtttgcagagcctccctttgagctgatacgatcaggtcacggtcaatgctgcgcttcaaaaacagcagcgatttgtaaagctgtacctctgtgcggtaagggcggcagtctttcgtttccagccatccgcaaaaagcgaccggtccgctctggatcacactgcggtccgggtgataatactcatagcagtccaggtttgccgtattcagaagatagagcatttcccggacttcattttccggcatgtcgtaaaaccgcaaaagcgagcggtaaagatggacatagccgggaatggaaatcatggtatttaccataaaataaaatcctccttgtaaacagcaggtgcgggagcttttgcccccgcaccgtctaaaatctatatttcgttatctactttcacgagttttcccatgacaagaaagcgtcctgtgccgcccggcgtacaggtagaaagggtcagtaccttatcgctgcaggtcacagtcacatcactttccaccgcagaacgttccttcatagctgtaagccaggtagtataagcaccgtcatccttccaggaaagctgccagggagaagttttactgccggattcttccggttttgctgcaaatgccgtaaagatctccatgacataaccccccttcggagtaacgagatacatctgcctgtgagtatcaaagtaactttgttcatcgtaccggttcagcaaggcaaacatggaaccatcccgcatattatgaccgtaaatgatcgtattgcggtctgaaaaatctgcccggttttcatagtcggcaaacaggcagccaaccttgttataggtcccgtcataaagatggttcaggtaatactcgttgttgtcggtatgcgtcaccggataattgagcaccgtatcaggaagagaaagccatccgatgatgtccggtccattttcacggagcgtttcaaagtctaccgaaggcaggacaatatcggcatcgtcccgttttggttctgtcggatcgggtgccgactccggggaagctgtctgctccggtacttccacatatccggcaagatctcgataggcatctttactctcagcatactggttcaagtcacggaacaccaaaaaaccgctgccaagagccaccagaacgcagagtgaaaggacagaaaccccgacagccgttcttttcggggaagtcctgctgtattttccctttttgaaataatacacagcaaatacgctgccaccgatcagtacggctgccagcagtccgccatacaggaaaatatacggatcatccccggtctgcggtaccggcttttgaggggtggaaggattggagggaacagaaggcttttccgggttctttgggttatccggcttttccggtttttcattaaagaactggactgtagatgtctgatctgccttgatctccaccgtagcggcatcaggaatgatgtaatccttgcttgcccggtttgcaacttctgttacggtataaataccgacacgaaggcccttaacttcaatcacgccggattttggagtggtgaatgtctcgcagtaggagccgtccgcactcttaacctcgatggcaaaaccatctttgcgcccgtcgctggaatcctttgtgatctttaagttgccgcggtaagcctcattggtaaacccgtgcccggcttctccattttccacaactgcgacctgtccatcttctgtgatggaaaaatagtaagcgtttgagtcaggctgatagccctccggcgctttgctttctttgataaagtagccgccagccagaaggttttccgccgtatgatagcctgcatcggtttctttcagcgtaccgatcttttgatcgtcaggatcatattcctggttggcgttggaatccgcatacaggtcgaacactgcaccgggcaggaagcgcaggaaagaattcttgtctttcttatcctccttttccacaggggacggttcctccacagcttcggttttagttacctgcacactgccgcggatcagggtgttttccacacggatctcgatatgctgtccgtctgcaccgatatatacatggtgctgctgcgggcttaccgtataaaggtcaggggcagagatctccttgacgatccagtgtccgtaaggaatgttctcaaaggaaaaactgccgtcttttccggtaatagcagtaagcagcgcattttcttcagtaaattcttcggtatcaggtctaaacagacccatgagcgcaccggcaagcgtgacatcctcgccgccttccgggttttccccgacttttacaccgtctacacgcccacggagaagttcattggaaacagcctcgccttcattgacaaggatctgtaccagggcggtttcctgaccagcatactcaaagacaaccggatattcctgatccgaaaggatataggcgccgttggttgtgcgttccttgacataatagctgccaaaaggcaggtcggaagcgaaggaagcgctgtaaccgccggattcctcagacgaaacagagaccacttccagaagtccacctgccgggattacgctgccatctgccgccgtcaggtctgcggaagcataaagtccaaaggaaatatccttatattcctcgttcatgccaagaccgaacaggtcatcggtctccattgccttgaaaagtgtgacatccactttctggcgttcgtcataaagaccggccgctgtctgtgtaacctctatggtctcacccgcataggtcagttccacatattccggttgaggattcaacacacagccggaaggcgcctgacgttcctccagacgataacggccaagatagagagacccgcttttcgctgtgccgtcctcgccggtcgtaagtgtttccacaaccgtatctttttctgcccgcaaggtaccgtcaccggtataaatatcttcatctgcgatcacatcatagaccgctccaggaagtccggcaacctcatataccggttggtacagtccgtcgttttcctggacagaagcaaatacttctccggtctttgtgatggtaagctggcctttctgcggcatattgtactgcgtgaccgtcacaaccgcctcgctgccgtcaatggtaaacggtaccggctggtcggaaagcacatagccgtaaggagcagctacctcataaagttcataatccccggcggccaaaggctccggcagcatcagccagccctcgtcagaaacatagaaggtattcagtgtttccgggttcggatagtagacggtctgggtgataaattccccggtggaaagatccttgatctgaaaaccggttccggtcacagggataatctttccggtctctgcgtcacatttttcaactttcagacgggctgtgatggtgcggttgttcaggatatagctgtaagtctttccgtcagaggaaatgaataccgtaaagtccgggacaaaggctttgccttcctcgcctgcgatctgatggaccgtataatgtccataaggaagcggtttactggaagcaaaaccatccgcatccgtggtaagaaggtcacgttcactttcctttgccgcgtcatagctcccggctgcctttaagtaaacttcaaagactgcgcctgcttccgggcgttcgatgataccagcattgggatcgtcggtattttcgccctcaggcacatccgggtccaggtcatcggtgtgcttgacaagctggatatttccgtaaataaccgtttccgtcacctggttttctgtggtattgagttccacttcatacagggaaggggatgcacccacttcataaatggtttcattcagaagatacccggtgctcggttcgatttcccggatcgtccagccatccccgcatacataatagcgggtcataaagctgccatccggtccggtagtataagtgtcgatcagttcgccatcacggaagatcccataggccgcccctgcaagcgtggcatccccctgagcatttccggtgtcagcatcactctttaccacatggacgcgaaatttcttcagaatattgctgaaatgtaccgaagaagtctgcccgctttcaatggtcacgtactgtgcggaaggggtcacatagcggtccaccggaagttcttttaccagataggttcccggcaggagcttcttttcaatctggccgttttctccggtcgtgacttcctcattgacttcatttcccaaaatgtccgtaccggagatatggaaggtgataccggaaacaatgccgtcctcactggtcttgacaagttttgcggtaccgtaagtttccgttttgaattttacaaagaaggaaaccggatcgctggcgccggtcatcatggtctggtagccgggtctgccccagatcagcatgtcgtttgccaccgggatattctttcggaattcaaacagcaccgggtccatcatcatctgcctgctggtaaaggtgtattcatttccgtttcttgtcacagaaacgccgctgcctttcaaagcctccaggtcgatcttcaagttgttggtatctgtgaccgtcagggtatagacctttttttctacatcccatttcagttccagttccggtgcttcgcttttcttagaagaagtaaaggaagggactgtggaatgggaagcgacctgtgccagaatccagtcataggctttttcagccggtcgtccggcgatcacgctgaaatactggtcaccatctgcgtggccgtttccgtggcggttgtacggatcgcttctaagctgctgctggtattcccaaaggatgatctgggttgccatcttatagtcatcctcgttgatcccggaaacagggagcgtcgcaccgggtttccagccatagatcgcagtcagggtgatccccctccttgcctcggcaggaagcaggttcaggtattggctgttggtcccgctttctgaaacataggtgttttccgaagtatggtaaggaatcccgctctccacacagtaaacctgatggctgatcccgtcagaatccgtcagcatatagtgccggtaagcattgcccccggaactggtgagtacgtcgatggttccgtctgcatggtaggcaagataggtgtaaggtgccggggcgcggtagtggtttccatcagagcccacatactggtcgcccagccaggagcttgccgtttgtccgacagacatggcaaaagcctgagccggaagaagccccaaaatgcttgccatacaaagcaaaaacgccaacagcttgcgaaagccgcggcgcctggttatgatatgttccatgaaaaaatcctcactttcataaaatctaaaaggacagccttatttgctgtccttgtcgtcaaaatcatcctcggaaagatattccggttccccgtatgcctcatccgggtcaaagccttctccataaccgtcatcctcaaattccgcatcgtcctcggcctgctgtttcggacgcacgatttttacatagtaaccgatcccgccgaccgcaagtaaggcagcaaggataaacaggatcgtgccgacactgccggtctctttcttcggcttttccggttcagccggtttttcggtttccgtcggcttttcttttcctttgcagccactcaagtcatttttgcagaccggacagccggtattgacttttcctgcctcacatttttcggtgcagttgcagctttcttcctggggaatcatgctcatgctgccattgttcttttctgcaagcgccatcaggtcggactctgtgacgccgtttaagaagtagacattgttatcttcccgtttcccgtcgatcaccagataaaagacattgcccgcgtccgtagtgatggtgtaaaactgtttttccccatccgtaccgctgatgttgtcctgtaccgttccggtgccttccggggtaaatgcaccttccgggatcgcagaagtattttcctgctgtccggtactgttatctgaaccggaagaatttccgccgccggaaggggttgcagcgtttgagccggaaggtttttcttccttaggcggttttgtctgtgtaccggacggactctggggtgctgccgcagcaggtttcttttcaggagccggttctttgtaatacggattatccagctttaccacatcagaacggttgccggcataatcttttgcgtatatgcttacctgtttttctgttcctgcataatcttttagtgcaaccgacgctttcccatcggtgagggagttgatacggttttcatcaacaaagaccgcctccacgccggatagatcgtcactgctttctattttcagggcatcgccctccagggaagcagtcagcgttggcggtgtggtgtctttggaaccgccggcatgagccgttacaggtaatgcgctgacacttacaagaagcgtaagcgccagcagcagggaaagttttttaagcctcatgcacatcctccttctcctgcggtaaaacagtttccgaaggggctgcctgctgtgatttcaaaaaatccgcaagctgctggggcgtcagtttgaaactgcgcgccaccgccacataatcggtattttccagttctgttttctgttcctccagcttatggagctttgcctgcatttccgcaatctttgttttggtcttttcaatttccttttccagtttttcaattttaggattcaatttattacctccaatctgttaaggcagacgcccaaatgtataaaaatgctgctgccagtagcttgtattgatgtttgcataagaaatcgggtctccacagtggatcatcattccatttcccacatagatccctacatggcttgcgccgctggtgttgtaggtcccctggaagaagatcaggtcgcccggttttgcatccgcacttgataccggcgtacatacacctaaaagaccatccgcggtcagccttccgaaattccagccaacgccgcagttgttgatcacccaggacacatagccggaacagtcaaaggaagtggaagggcttgcgcctccccatacatacggatagccaagatatttttccgcctcggccatcattgcggcaaactgttcatccgcaagggcttccggtggaatgtcataatcgaagtagtttcctgtgccgcctgaaccaacttccggcaggtgccgttcgctggtatcgccggtatcggcaaaatacaggggattcaaatactggccgtcaaccaggacttctaagtgcaggtgggccccggtagaatttccggtattcccgacctttgcaatcacatccccggctttgacctcctgcccggcagaaacaaggatctgggaacagtgcccgtatttggtcgtcagggtatgtccttcgtatgcctcgccttcaatagcgacacacaagccataaccgccgacatttcccgcaagggtgaccgttccgtcatgcccggcaaggatctctgtgccctccggcatcccgatgtccacaccggtgtgatagttcttttccccactgatgggatgtacccggtagccgtaataactggtcacataagggagccagttggtgccaaagacatttttgacatactggcggtttccttttgtctgcagcaggatctcgcagatctctttctggtctgcgttcatccgggaaacgaccaggttttctagaggtgtgactgtgagcttgacatttaagatgcgccattcataaggcacttcctcctgggtttcttccccggtttccggatcaacggaagtttcggtgcggtaacggatctcggtttcttctgaaaaggacagggtatattgttcctggaaaagctgccgcagcacgctttccacttcatcgtaagtaaatccctgataagcagaagtcagataccccatcagcacatacgggtcatgctcgattgcgcccaggttatactggtattcgtcatagccggggcggtctgattccacccggtctatttccatttgcagatccgtttcccattcggtataggtaagctccgcctggttgatgtcctgatcatctgcaagataggtagaagcagccagacttcccaaaccgccggtcccgatattggagaacgtggaaaacagggatgtgatcaggaaaattaccaaaaggagaagcaggaggacaaggcagattacagggtgccgtttgaccgcatggacaataccgacgctgaccctctctgttgcgactgcggcattttttgcctgtttcccggcttcacgggcagccttggcatactgccttttcagtttttgtttctgccatatccgggcaatcgcatgtttcttcagctccgggtggtcgctaagagcctgccggtaagcaagtcttgcgttggcctttgctgatttttgctgtaatttcgctgcctttcggtagggggcagttttatgccggtgatatgccgtgcgaagccctgcctcgcccacaagttcagagcggtgggatgccttgatccccacattttcatcctctgcctcataaatctttttatgagcgtaaccaatggcagtattggcgcccgccttgaccggacgcagtggtacaggcccttttacatgggccttttgtgatttgacctccttttcaaattttaagtgttttttggcttttccggtctccgggtcggaaaccgtctccatgcgcagtttcttccgggccggcagacgattttgtgcctgctctgctttttgtgcagtacgttcggccttccgccttgcatgggtgagctttttatcctctgtctgcggcggcagttcatccgcagtaaattccagcttggatgtttttggcggttcgctatccacacccttttccttctgcgctgcctgttcctccgcctgtgccgcttcctgaaaacgctgttgatatttgttcccatgctgatgtgtccggtaacggtgttcctgactggatctgtctgtgctgtccggtgtggctgagccttcggaagaaggagcatattttccggtatcatggtctgtcgcattctctgttacaagaaaacgtctggaagcctcctgccggaaattgcttcgcacgttgtcctgtatcgggggcgctgtcctggcagcatccggtgtctcaaagtgttccgaaaaaccatccaaagcggttgcatacgcttcgccctgttccaacaaggactccggtgtttccggtgacagatgggaaaattccgtctgtacagggatgtcctgcctgtgtgtcttgccgttgacagaagaaggggtgtcccgtgccctgcgcaggtcaaaatcctgttcggtctgcctggctgccggctgatcctccccgtgggaatcacgcaccggcatccgggtatctttacgcttcctttgaaattccctgtcgtgtgccattgttctcacctccgatccattttaatttttgcctcatgctttggtccccgccacttcatccggtcttgtggtaagcacgctgtacaagagtgtgtccttcgggaagtggtccacaaaggggatgatcacatttccaaagaacaaaagcccctcgccgggaccggaatgggtcacatacgaaagttggtgcggggagatccccaactgctttgccaaaatctgacggtctccctgggcctggttgagcatatagataaagtccgagttctcaaaaatattttcgatctcacgggaagccagaaggtccttgacattctgcgttaaacctgatgggattccgccccatttacggaagcgtttccagatctccacgctgaaacttcctgtctgccctttcaaaagaagatggaattcgtcgatatagaaccaggttgttttatgtttggagcgattggccgtgacacggttccacaccgcatcctgcatgatcaaaagcccgatttcctttaaggcttttcccagtgacttaagctggaaacacagtacccggtgttgatccatctggatattggaacggtggttgaacacgttaagggaaccattgacatagatttccagtgccgttgcgatattctgtgcttccggttcagactgtttcaaaagcagctcgtaaagatcgcctaagatcggcatattttccgggcatgggttctgcaggtattcccggtacaccagtctggtacaacggtcgatgatcgtcctttcaataggggaaagcccttctttgccgccgatgataaggtcgcacagcgacaggataaaatcacttttcaaagtaattgggttttcatcatcggaatagtccagattgatgtccatcgggttgatgtagttcgtggaagtaggagaaatatcaatgacctgcccctgggaaccgaactgctgtaccagcggcccatactcattttccgggtcagcgataatgatgtcgtcctccgtcagaagaaacacattgacgatctcacgcttggcagagaaagatttaccgcttcctggggtaccgagaaacagcccattgggatttttcagcgtttttctgttcgccatgatcaggttattggaaagggcgttcagaccgtaatacaacgcctcgccctcctggaacaattcacaggtggtaaacggtacaaagatcgctgtgctgctggtcgtaagcccgcgctcaatttcaatctggttcgtgccaagagcaagcgaggacataagcccctgttcctgttggtaatccagccgttttaaggcacagttgtatttctgtgccacacccgaagcggcaaaaatatcattaaacagcttctgacgtttggcagcgatattttccaccagtaccgtcacaaggaacatgcgctcattgcggctctgtaaatcctgcaaaagatttttggcttcctctccataggtggtaaggtcggtgggaatgatgtccatgtcatacccggatcggaccgctttcttttgttcctcaatggtcattttctgcaggtccgacattttacgcttgatgtttcggatcgcctgcgcctggtcgatagactggatatgcaggttgacggtcacggcgtcgtttaagtcaagaagatccgctaaaagccggtcggtaagctccggcgccaaaatctgcaaaaaggagacagcaccggaatggtcgcctacccggaatgtctttccatcctttgaaaaagacagcccggatggggaaatgaagtctttggtagaaagaccagtcttaggcagatccgaccactggaaatgaaacttttcctgaccgtccgggtgaagctggctgtgaagaagttccagacgttccagtccgtttaaggatctcgcctgaactcccagggtcttgaaatttgccagcacatccgtttcaatgcgttccagacgcattttcgcagtacgcaggtcatctgcctcgattccaaaggtaatgtatttgcgtttggtgagaccgttatttcctttctgcaactggttctttaacatatccccgtattccctgcggattccgtcatactcgtcgccgcggggagggatgtcaatgcttctggtaaaatcctgcatattggcccgctggttgataaaggtaagctgcacatggatcgaggcatcgaagtaatttaagaaatcgcagtaaccctcgaagatctgtgctttatcatctgcctgtgcaagctgatagttaatatcaaaaaactgcaccgttttggtgtaaagggtatcagtcagccggcagatcccatcccggtacatttcacggtaggggatgctctgctggaccgtctgcggggcatctgctttcagcccggcaaaaaagccgccttttttagacggcttggaacgggcagacttagttttgccctgctttgcatcggctctggtctttttggcctgcctgatatttttttgcagacgcttttcctgagcttcctgctgcttgttttttggcaatctttgtaacctccttctttgacatagatttatacaggttatccgtcctgtatggacggtccttcggccagagcttataacggagccggttcttcaagatcttttctgccggctgcccgtcacgctcatacatggcgaagaagaaaaagggcatcatcatcccgatcatcaaaagtacagccgccgaattgccgatcgccccgcgggtaaagaaatacaccggaaggccgacaagtccggcaaggctgaaacaaataagctggcgcttcgtcagattgaaggccagcttagtcttaactttggttaaatcctttggtacaggtacataaggcatctatacacctcccatcgtaatataatttccggcccattaccgtgcaccgaaatcgcgtaccggtttctccgcagccggacattcccgcacttcctgagccgcattttgcagccgtgccaggacagaaacagccggctctctctgacacaggtattcctggctgtctcggattccggcaatattttcccgaatatccatatccacgtcgaacacatctgaaaccggcataagccaacggtctgcaaagtatttcaaaggattctcaagcgccagcacatcatccagcatttcatccctgaactcaaactttgttgtcagataggaatacgcctcctgcatggctgtaatttcagcagctttttcaattaaggattccttatctcttgacataaggctttccctgtaagcaaagtaattctgtcccagccgtttcatcaggagcgtatatttgtcctgtgcggaaggttcgcttgtgaaatgttcaaatttttgctctgcatcaatttctttgagaagatcgcagatcgggaaactgtgttcatggttattttcttcccagcaccatcggactacatccaacgggtcctgaaaagaaagaagtgcctctacttccgccggagtaaatacatgctcaaccttcagataatagtggagttccgaaaatccctgcaactcgtaaatgctgccgatgttctgtgcatccagcatatccgcatgaaccttcaaacactcgtccagccgttccataagcagccgctttgcatcttgttctatcaaaatcacccctttcgctccggcatagtcagcgtacagttcacttcattgccccatacatcccagccgggagtcttttgtcttgcaaacagttccactctgggctgatcgcccatgagttttacgatcttatcccgcacctcgtccggtttcttgctgtgctgctcaatatgggagatcacaaactgatggattcccgcacactggcgtttcggacggcctctggttgccagcaggcagacctccgcgtttgagcgggtccaaaagcccatgccataaaaccagctatccgctttccggttctgtttgagccatagaaaagctagcgttttatatttgaacccccaggcgtcgatcacccggaaggcttcattaagctgcggaaaggttgcccacagaaagagggcgctgtcttttgcggcaagttccgataccggcagggcacagatttcttcaatgctcattgtggggtaatggttttccgcaacgccgcttccatgtttcctgtcataatgccagggcggatcggcatagataatgccgtactgtttcgtttccggcattagcgagcctgctcattcttagatggggcaggtttagtcggctgttctttgaccttaccggcattttccttcaatgtaccggtcagggaaggtttttccgcagctccctttgtcgcttcaagagtcgcctgcaaattttcaatagcctggccgtacccatcaatgagagcatcgttgagctgcttgcggaactctgccgtaaccggccagcagacatctttccagttgccgcccttatcctgggttgcgggcatattgacatacagccccttttcactggaacagatacggaaaccgtcaatcttaaagcatccgccaatcgtaacattggcaaacgccagcaggtttcccattggagcaatcggacgcacgcggacatccagcttcatgccgtttgccatttccggcgtctgtgtttccggcgccattttttctgtattggttttactcatatataaaatcctcctttttagaattggttttgttcatgctatcttgcattaaatatggatttggataacgaacctgtcttaaacagggcaaaagccagcagtaccgtataacccgccgttccccagatcgcgccgtgcacgtcgccggacgatgggatagactggaccagcactgcataaatggcaacacagatcaggatcaaaaaaccctgaaaacccagggcaaaaagggaacgcagatacccggttcccatttgtccccattcccggtttgccattgtggaaaacgggatcggtgcaaggctcacggttaaataaatctcgatcatacggccatatacaatgacaaagatcacgatggacagtacccacatacacagattgatgatgttggtttccagccacaatccaatcagttcccacattcccattgcttcaagctgggtttccaggtcagacaatgccgcctgcacatccaggttcccgtttatgacaccggcactttgcgacaccacattttgggccacatcaaagaccgccatcacaatcgtaaaacagttggtgagcaggtaagtggcaacaaaagtcttgaaaatccacttgaagatgttgaatgtatcgaattcgtgcatgttgttcttttcgagaatcatctggatcagttcatacaccagaacaaaggtaaggatcatgcccgcaatgggaatgacgacggtttccgaaagattctggatcatggaaaacacgccgccattccagccctgcggggtctgtcctacctgatttgccacatccgcaacctggttgttgacggagttgaaaatactggtgtactgtccggtgatcgcatcgatcaggccctctttaatccagtctgttatccattcaaacagactgcccataagtcagcccttaaccgaacaggccggaaagcagcgggatcagcgttgcaccaaccagagcgatacctccgcctgccataagctgcttgatcccctgggattttgcacctgggttatcatttccgtaaccttcgagaaggtttacaacaccccatgcgcccagacctgcgcccagggcgatcacaaggatcttcaaagtatcaatcgcgcttgcaaaaaatgccataatgttcctcctttaatttcagaaattttaatttgtgatatggccgtatcaggccggaaacaaaaaaagccgccgcactgtttttagaaaaaaatctgtttcaaacagcacggcggcatggggcaggaaaaatcctgcggttatttacttttcagggagaatcacgaatcctcaaaatatcctcctttcatcgtgacaaaaacaaagcctgccagggcgtcatgctttgacaggcaggaacaactctataaagtctgggaagccagatcttcggctgtgacttcataattacggtatcgttcaccgggacgcatcggcatccgggtagaaagaaacttttcgatattaaaagcgttcttctcattaaaatcggaaagcagtttgtaatttgggtgtttggttatatcgtatttccgggagaggaacggccgcacacccctgatctgcagcagacatttgcccccgtccataactgccagttcatccaccgacatcaggtcctttcccagcttttgaaaattttgtccgtgggattcctgatttccctttgtgacactggtgttatagtggagtagggaggcaccgccttgccatattactatggtaggttcgcaccaccctctccgggaaccggacttacatctctcaatgtatccggctctgttatcgttcggtcagcagttactcactggttgtggattgcaacatggcattttttgcacacaaccagcgttttacgccgttttgcaatcattgcaacctcccatgcctgcttgcccttaaggtttttgagcttgttgacatggtgaacttcgtaacaatcgctctcggtcgtaccgcatagctcacagacctttgctttcaatctctgctccaaggctgttcgggaatatccgtactccaccgcagcattgcatacgatgtccgtcggattggccttatccttgcaatcggagtattttgcaaaatagcatcgtttttgccccgttttggtttcgtaggggattccccattctccgtagtggtctttgaatttctcaaccaccttggctatggtgcatttatgcttacttgcgagggttttgaggcaactgtattccatgagataggaaaagtagcacagtttataaaaattgctggcaattccatagtagttgcagattccccgcagttccgcattgtaggcagaaacgatttccaaatctgtgagtcgcaaaagagatttacggcggacaggcatgagtttcccatccggtttctgtatcgcaatttccttggcgaaaatgaagctgtgaatcttatcatcgaatgggatagacagttcacaggaattgttgagggtgcgttttgtctttttgcctggcccaccatgcttgataatgctgcttctgcgaacacgaacatcataccccaaaaatcttgcccttttgctgctatgagtgatgagtgttttttcttcgctgagttccatctttaaggtttcacggataaactcagaaagtttactctttatccactggcagtcctcttgacttcctttcacaccgagaataaagtcatccgcatagcggatatacttgatgcacttttttgtctgagctgtacagggcattttcagcatgagcttccgcttttcgttgtattcggaaagcagttgttctctttctgccccggtgcgtctgccgatgtgataggaaagtttctggaggtcattgcttaggaggcgatattctgtcctgacaggttcttgcccatgggtatcaaattcgcttttcagcttcattacaaatttgtccagctcatgcagatagatgttagcaaggagcggagaaatgataccgccctgtggagtaccactgtaagttttgtgatatttccaatcctccaaatatccagcctttagaaatttgtaaatcagctttatcaaccgggcatccttgattttactatgaatcaagcctacaagaacgctgtggtcgatattgtcaaagcaccctttgatgtcaccctccacgaaccaacgcataccattgaactccatttttaaggatttcagtgcggtatggcagctccttttgggtctgaatccatgagaaactggcaagaaaacaggctcatacaccgcttcgagaaccatccgcagaacttcctgtaccagcttatctgtgaatgtcgggattcccagaggtcgctttttcttgggattgttcttcttctggatataggttcttctggcgggtgtgggctggtaggtttcatcagcgagcctttggatgatatttgcgattttggcttcgctgaatccatctgccgtgtcatcgtttgcacccttagttgcggcaccactgttggcatacagatttttatatgccagaaaatacaggtctggcctcagcatatagcgatgcagtctggtaaaaatttcatctttatttgcgagtgagtttctactgattcttgctaaaatttcggttgttggttgcattttgaggttttcctccctaatcaacttttcttttagtacacaataactacgccccttcgccatgtgagggtcattacccctctcggactactacgggcgttccgtgcccatgcaggattttcaggctctacagccatagccgaattttcacctccttcggttggcgttcctgtttagggcatccccagttagcgttgagcataggcaaatgtggattgtcggtctccgctttcgtttccttgccataggttctcctacagattgcacaccgtttttgataaccgattgattgacacctataaccaatcgccagtgtgccagaggttacagatactttcctccgcctgaccgataacagaaattagaaacttgcgttcagtaaacccaacttaagcctcatatccacttaacattgcagttcagtcgcaccaagttatctttaggtgacttactgctttcctgccgtgctgtgttcccgtttcagctttcgcctttcggttaggcaggttgtttcccgtgttatcttacggggtagtgccttacactactttgctcaacgccctatctgggcgcaccagatcaatagtctctttccctaatagggagttccagctttttaaggtagtttcttctttgcctcctaagaaaagagaggcgtcacagttaccgatgatggtgtccatgttgtctttatacagggctttgagctggctttgcgcctgcagcaccaggcaggcagagatctcacggcttcggatggtcgccataagacgctccaggttcggaatctgcccgatatttgccgcctcgtcgatcaggcagcgcacatggatgggaagcctgcccccatatacatcatccgcccgctcgcacaagcggttaaacaaaatggaatagatcagactgatcaaaaatgcaaaggttccgtccgtatcactcataataaggaaaagagcagtccgttcatcccccagcatatccagatccagttcgtcatacatggtaatttccctgacttctttaatgtcaaaaggagccagcctggaagcacaggaaataaggatcgacttcgctgtttttccggcagcgagcttatatttcttatattgacgcagggcaaaatgatccgggtctttctgttccagcgcgtcaaagagaagatcaacggcatttttgaacgactcatcatcctcacggacttccattgcgttcagcatttctaccagtgtggcaaagttctgttcgtttgccggagcctcataatagatatatccgatcagtgccgtatagagcagggtttctgccttgacccagaaatcgtctccggcttttccttcgcctttggtattggcgatcagagtcgtgacgatcttcaaaatatctttctcggagtgaatgtaggcgaatgggttaaagtgcatacttttctgaaaattgatcgtattgaatacccgtattttatagggctcatagatgatctttcctttttcattacgcacaggctttccgttcttgtccagctttggcgtgcctcgctgcaacatctttccgcattccacaagaactgtacctttcggatcggtgacgacgtaggaactgtgcatttgcatcagattgggcttgatgaaaaagcgcgtttttcccgaacctgatcctccgactaccagtacatttttatttcttgcattggccggatttttgggccttccgtttaacattagtccttcactttgggtaagaatgatattgttttccggctttgggtccataaacggggcaatatcggctttatttccccaacgggctgaaccgtattccacatttttgcggtatttcttagcgtctttccctctaagatagactgccagccgcataatggctgcaccgcataaaccgatcagccagtccattgccgcccccggccacatactctgaaacgcaagggcaaagccttcggacagtcctaacagcttttgggaagcgtctgctccgggagccagccgcaccgcttcgcccagcttggcaaataccagaaggaacagaacataaggcagatggagaatgacctgttttttcaatgtttctgcatcaatcttcatcgttccggtcctccgtgttctttgttctttacacggtcacggccaagcgactgtgccagttctttgaacttatgaagctgtataagcagcgacggtctggtgctgcgtgtaaggtctttctttgtatattccttaaaagctgccgtcagtgcatccgcctggtttgccttgaaatataccgtccattttgggggatcggtcccaagttccttttctatatggtagcgtacctgatgttttctggcataccgttcaaaagagcggattcgccctgaaacttcaatggtattggctccggggtctttataagtcagccgcttcatgctgttgcgcccgacttttggcattgtgcgttcctgttccatcttttggagtaccgcagcaatagccgcacgcagtacccgccctgacagttttgctgcctgtatagaaacagaaaccgttcgttgttcgagttcttcctgcaagagcatcctcctttctgataaaatcggtatttataatatggaaataactttttaccggctttccccaagaacctgctgtcgggaagcgtgttcaaaggcttttgctgcctgatcgacctgaattttagcatgtttcaaaagcgtcttgatgatcgtagccgggcgttcctgttcctccagatgatcgaccatccctttgcactcatccgggaggtatgccgccatatctttcaacacatcggaaaagttacccataaagccccagcagctatccgacagctccccgtttttataaagctcaaacccataacattcgccacgcagataggaatcataagcggcgacttcgctgcgcatcagtgcgtccgctttctgccggatggcgccggtcatcttgtcagcgtcaaattcctttagggcatcttctttggaaacatagatccagccgacctgtccgctgtcccattctgcatgaggagccctgcctgagaaactttctgtactcatggcaagacctgagtggtcgtagagatagagggggagcatcagatacttttccgaaattactttctgcattgcttcatcgatcgcccgttcctctgtctttggtccatgccggaaacggctgcttacaatgtttaccatccgttcatagcgtttcatgccggcttcatcatgtcctacggtatctaaatacatttcccgcaggaagtcatctttgtccatatggttgtgatggtcgcccagcgcatagcggggatgaaagcataccatcgtcccaaaatgttcatctacctcacggggagagatcagaatatcgtccggctgcaccataagggcataaggttcatttactgccattaacataattggctcctttctttctacaaatccgggccggaatggtgcatcatcggtttttcccggtgctcattggttgcaggctgcttgactgcaatgatctcgccggcaagccttgcaaatttttcagggtacttaaactgctccccatatttctccatcagatccggggaaaggtctgtaaaattttcctcgccaagaccaacgatcagaaaattcccggacacaatatcatagatgtggccgtcatcgtcaaagagagctcggttcaaaggcagccccatcagcttgccttcttcattgcagatcagagccaccgggtcctcatacggatagaccgcctgaatatctccgcccactgccgcctgcaaggatttcagaccactttcgatctccgcagcataaggggacttgcccggctctaccattaacactttcataattgtatatcctccttctttttcattgccgtaccgggagtggttggcgttttttcctgagtttttgccacagagagcttccccaggacggaaggcttctcctggttttcgggtgtaaaaataccgccctccgaaacctcggcggcggcatgttccgttttggcctgttccagtccttcaaccgtatagccaggtaaaagagtaccgtgaaccataaaatggtgctcatattctttcgggatcggcggggaaatttccgtgaataaatgggaataggctttctttcgcccgtccaggtattttatggctgcgttcttatctgtatatcgtttctggttttgtccggcaatctttgctccatatccctgcttcggggaatgaatacggacttcccatgtcacataccaggcaatcggaacactctgtttggtttctctgtcatatttcgtatcttcccaaatactgcaggtcatctgatagacccggttgctgattttctgatccgccctccagttatcggtgtctttccactggttgccggtatgttcaatctccggtgtacgaagatattccaaagcccggttgatcgtctgtgttgccgctgcctgctgttcccattgttttgcagcagccaccacgatttcataggctttctgctccccgtcgatacttccctggcgcatggcttccaggctatctattcccattgtgatcagagtagaaatatccacattttcacaaactacgctgtgttcaattttaagctctgatcccggcgtcaagtggtcgccataccggtaggcatgataatctttattttcttccaaaatgctgttcacctcctgctatatttccggctcgtggttttttctggaaaacgtctgtgccggtgattttttatctgccggcctgtttgccgcaagctgatccatcacggaaggacggccgacgccgaacatggatagctgcccgtccgccgcctcacgaagttcagaaacagagaggggaagcgttacatcggcatgggtcaatagctgttcccgtttcaaatcctgaatgatctcgtcaaaaacagcgttgattgcacggcgttcttcccccacagggaaggctttcaatacctccatttctccgtctttaccggaaaccagggtaagggcacagtcggcatggcctgccagataatccgatgtgtagggcagtttgtccttgatataacaggcaaaggctctggctgtcatttccacattgctgtcccaataaccgccgtctttttcacattcttttcccatgcgtaccgaattacggtaaaaatcagtttccgtccgtccaatctgcggagcttcctgcgcctgcatcccggaaagcatacgctcaaaaatttccagccgttcccgttcacttttgggaattacccggccggtaacattcttcttaaatgcgctgatctgttccacagagccgggttcgccggacaaaaatgcttcccgcaagactgcgtaggtttccatctgttcctcattgccataccgtttcagggaggcaagaaccgaggaatccagccagcttgccgcatttttccgggtgcgttctgtttgtgcttccgtgcgctttgctgcctgttccggtgtttccggtttatacttcatggtgtcaatgagtttttggaacggcgcatagaggtggggctgttctgacagcatcccttttgctctcatctttgtaccaagataatcgtcaagtccatgccaccattcatgtgccagggaaccggccccgtgcatttttgtaagattgatgactgtacgcaaaggttcataatgagctgcagcattgccgctgcctcttgcaccaaaagcgatagcaagtgttccctgataagcaatatctttatcgctgatcttaagggctgacgccagatcctttagtgcttcaaatcccatgttaagggaggtctgccggtcgttctggttcatccagtttccaaactcaccgccgcggaacccaaaggtatcaagataatgctgtccggtgatctccacgccattccgataatccggtccggtacgtttgacatgggcaagctgtggagggacaaaacggatctttccgtttttgttcctgcctttggcaagttcctgcacccatttcagggcagcttctttggtcccaaaattggtccgcaggatcgaatagccttttgtcacatagtaggtaccgggtttccagtccccatttttagaataggtctgtttcccgtcgttgaagtggatcgcataacctttcggtattttctgctctttggaaacacaaaactgttccttttttgcttcctgagtaaagttgcgctcaaaatattcagctgagcggatcagcatggtattggacaatttgtttgtgatcacgggattgtcctgtccctttttcgttgcccggtaatggattccgcttccccagccctgtaccttttctaaatatccattgtcaacgaaaaagcggtcataggctctcacagcatcctccacagtacggacatctgaaagcactgtctgcaattcccggactgtttttatatattccttttgtctcgcggtccgtttttccggggtgtcatccgtgcggtaatactgaggggaagcgtttaagccgtctcttgcttttttaataaaatagaccacgccaagaggaatcccttcctccagcatggctgcatagtccggctttttccaaacattatcctttttcacaaatttttcggcttcgcgctcattcatggcttccagatcatctgcatacagcccgcggtctttccacaggtcttttttcgcaccgccgatcttttcgccgaaatcttcatgcactcctgccaatcttcatcacctccagtcagtgtaaaattcttatcgctccggggcagggcggcgttcttcgtttttgtgaagttgtgggaggtttcctgtgagccggtcagtttccctgcggatcagtttgtccagagcgcctaaatcctccggtgcaatggcaaactcccggtaattttcataccacaggcccgtagagattgccgcgatgggcgcaattttctccgaaccggatggaagaaggcgatacacaggggcttcgtcataaagaagcatctgctttgccgttccctgtggtatgcggtacttatccatatccgggttctgggctgcctccatatattgcatattcaggcgttcttctaaatcctggggcatataacgaaatgcctgatccatccactgtctgaacatcgtggaatagtggtactgccattccgtaacttgattcggggcataagaaaatccccaacttttcagagcatctttttcgtaaagctccatttcagtccattctttcaggctgaccgtagccgctgaaccatctttgcgttcaatattgacgccgcagggatagaggatatttctttttatatcctgccgcagcgtgtctaaatccatcatcaggacatctccgtacaagtgaccgccctcgctccgatccgtatgaaacaggaaagccctcgctccgatgaactccgttgttaagatcatttgatgaagatccgccgtagaacaataagcaaataaggcgtcggaaagccacatgtgatttttccccatgatggcaatggaatcagccccggtatttgttgccagagaacgcatattgaattcgcattctctaagaaaatctccggcaaaaatatggagttcatacgcaaagacggataagtctgtatcgcggatcaaatgaatctgcggtagtggttcctgattcaatcaaattcctcctttcatgtgaagcagctctttgacctgctcattttccgcaaacggctggctatctgtccccgccatttaatcaatccctcccatctgccggtagctgcccgccggcaatcttgccgacaatctccggaccggtttcataaatctgcatgaggcgttttgctgtgccgcaaggctgtgcagctccgctggtccaaagacgcactgtggatggggcaacattcatcaaaagcgcaaagcccttttcgttcatgtccagctttttcatcagcgatttaaccatatcggggccgtagtctggacaccgggaagcctcggcaatcatctgcaaagcggtattttcaatttttttcattttcaaatcctcctgttatttgttttccagccttatgccggggcaaagctgatctggttgtgtttcatccttttggcaaagtccggcatcgaataatttaccccgtcaatttctgcatgggtgtcatccagacgatgacaaacagcaaagtgcctgtccccgtttccatagaacaggcagagtaaaccattgtcgggaatggaaaacagcgcttttccggcgctgtctgtaaagcagatatgttgagatccattcatgttgaaatcctccctaaattgaaacagccgcctcttttgggcggcgttggtgctggctggtttgcagttgttcccgaaccagcagcaatttctcattgtaatcttttcccatccggggagggttgacacttacccggatatgacggaaacgtttatcctcgtgaagcatggtcttgattttccgggcattgacaaatccggcaaggtcgtggtccatataaagggtaacacgccgtatctccgggtggcgttccaggaaagaagtcagcgccacatgggaagtaccgcccaaagacaagcgataaccattccatttccatccctccagctcttgaagtgtcgcatgggaaagcgcatcaataggagcttcaaagactgccacatgccggctgcccggactttgcgggggataacaaaagttatatcctttgtcgctgccatagacatcctttttgagattgccgctgatactgcgcatacaggcaaacttcgctttcccggaatcatctttcccaacaaacacacaaaccggttctccatgataccgggcttcgtaaaaaatcccggcttgtaaacactggcgaatgacttctgagctgatcccccgtttctgcaaatagaagaccgcagcggtcgcgcaacgtctggcccaggggagagcgaatgttttcttttccggctcttttgatacctgtatttctgccgtacttcggtaagccggttcctgtgggatttcgccacctaccagagcatgaaccgcatccacaagaccatatccccgaatctggatcaggtagtccagcgcattgatactccgtccgcggctgttccagtaccagtaccttttcccggtcacatataccagactgtcatgctccttatgccggaaattaggtccatcctgtttcagcacgccgggttcatggaattgcaggtaagtaaacaagtcagcttcccgcgctgcctgaatctgttctttggttacgccgggcatagtaccggcacagtgtttcttttcattgtgctttgcctccttcctgtgatgaaatgaaaaaagacacccaaaggtgcctaacagccgtacaggtcgtgattgacctcggcacggtaatagctgtccattgtagccggggcattatacagcgccgccagcagatacgctttgatgtttccgaccttcgttgtgttcttgtcgatacagtcaaagacatactctaagtggccggaattgatcttcaggaaccggctcttgacgatttccctcggaaaatcatctccggcaatgcgaatgtaagggcgtttcgacaaaatcacttcaagcataagttcaagggcttcatccaaacgttccctgccataccgtaagaccagtaagtcatattcaatattttctttgatgatttcacgataggcttctatcagctctatccgatccatcccatccgtgcggtttgccgcttccggctctgccggatagattgatggataagttattgatttatctttttttgatttttttgtttttaatggattagtatttaattgtgccggattttcctgttcaggttccgcctgtttaggttttgcctgttctggttttacctgtcttggattttcccgtttaggtgaaagccctgtgttttcggtacttacaggctgctcatggatcgtatattcaatgtctcccaactgcccgttatcatagcggaggcgctgtctggtgagataaccatgccgctccagttccttcagggcagtagtgatagaatccacaccatccttgcagatatgggcgagtccctttgtggtataatcccaatcttccggcagcgacaacataagtgataaaagcccctttgcctttaaggacaactccgtattgcgcagatggtgattgctcattatcgtaaagtcctttgttttctctacacggaatactgccattgtaccgcctcctttcttcgactattccgttacaaggcatgatccctgcggtcataatggagatgaccgtcagagaccttcgcatggtttttcagtttcacttcgccccgttcctggctctctaaaaatttctgatagccggcatctgtaaggaacaagcgcatcttatcgcctttgtcgccaacaggggaatcgtaagacaatacatcaaagacgatcatgtgctttacttctggatcaaagcgttcaagtgccatgatgtcatgccccttcaatttttctgcccctgattgttgtctggcctcggcgatcttttctccaatcgtccgggctggatagggcagacggtaattcttctgaatatcttttaccaagtccatgcactctgcatttgacagaacacgaagttttgccataagaccttctgccgcctcccgctgttcggaattatttgaataccgcacggtcatataaagttcattcaggatctttgtctgataatcgccctccacttgaaagagcagctttttttccatttcgtttaattccatgtggatctcctttctctcgaaaatgagtatgaaaaaagggcgtccacctataaaagtgaaacgcccacggcaaccagcggtcagacataaagccggaccgctggcactattaaattttgtcgttaataaaacagcctccttttttctttatagttttcgtcaattttcaacttggaaaaggaattgaataaaagacgacaaacgctcaaaccccttgaaaataaaggctttttctgtttgtcgttattataccgtaacggcacagttgtgcaagcctgcttcttgcaaacggcgtaccgctgaaacaaattcaggagtggctgggacacagtgatttttctaccaccgctaacatctatgctcaccttgactacacttcaaagctgtcgtcggcaaaggcaatggtcagcggaatggcacttcccgaatcggtgaatttcggcagcaagtgggctgaaatttcagatgatgacggaaagaactgatttttaaggttcgaatacgccaaaatgcccaaaatcgccttgttctttccaaaaaacaggctgttctttccatagttttgagccgattttgagcaaaagggcaaaaaagaaaagcccgaaaaaccttgatttttcgggcttttttggcggagagttagggattcgaaccctaggtacatttctgtacacagcatttcgagtgctgcaccttcgaccactcggacaactctccgtgtatgtgattccgcatttcttccgaaaacttttggaaagaactgacggaaagaacaacaaaatattcaattttcgaaccggagaaaacccctgaatttacgggctttttaagcggagcaaacagccaactctacaaaaaatttcgagtcaggcccgttatgaccacttcgatacgcttccaattctattgtgcactgcaatgctttcctgcaacgcgtattattttaccgggttttccggtaaaagtcaagtgttttctgtcaaaaaggttgacaacgacgggcataagcggttaaaatatactgtgtattatctccgtgcggccgacggcgcagctaggcgccgcgcttttgcgcgattttgttttggaaagtgagggtgccgcttcggcggcagatggcttatgaaaacgatgaaatggatccgccgtgccgcggcggccgtgatgtgtgcgcttctggcgctttccaccgcggcctgctcgcagccggtcaatatggaatccggtgtgatcacgcaggattacccggtcacgatcaacgaagtcacgatcgatgcgaagccgcagaaggtggcggtgctctcgggcagccttgcggacgtcgtgctcgcgatgggctatgagacgagccttgcgctggcgagcgaggactgcacccagccggagcttgaggtgctgacgaagatttctgcgacagattccgccgcgatcctgaacggcggcgtggatctggttctcgctgagacgatggacgacgcgacgcgcgcggcgctcgaggaggcgggtgtgaaggtgctgcttttgaaccgcgctgcgaaccgcgaggatttcgagcggctttattccgaggtgggatcggcgctgaacggcacctcgaccggcgcgacggccggcgtcaaggcggcgcagaatattttttcctccctcgacgatctcgcccggctcgtgccggagagcacgacggtcgtcacggcctgctatatttccgatctgagcgggcaggcggtcacgggcgacgaactcggcagcgtgatgatgtcctatatgggcctgacgaatatcttcaaggggcgcaccggcggtacattcacctatgaggacttgaagctcagcgatccgacgatgatcttctgcacggaagccgtgcgcacgcagatccttgcggacacccagtatgcggagctgacggcggtgaaaaacaggcgcgtctatgcgatcgacccgcactatatggagtggcagggcagaacggtctacacggctgccctcgaaatgatgggcctcgcgtatcccgagctgacggaatcgagcgagccctcggtgacgatggagctcggcacggcggagccttcgccctctgcaagcccggcgccggaatacaaggcgctgaagcagggcgacgagagcagcgaggtgctcgccatgcaggagcgtctcgcggcgctcggctatctgaccgaggaatacgacggcatgtacggcgaggttacggcggcgtccgtctcggcattccagagcggcaatggcctggaggagaccggcgaggcggatgctgaaacgctcgcaaagctcttttcagacgaggccgtgaacacagacggcgaggcggtgccgatgccgagcgcctccgcttctccgacgccctcgccggcgccggagggcgacgcggataccggcagcacggcggcgacggacgatgcaccgccctccggcgcggccggcggcgtgggaacgatcggcacgcacgacgggaactgacgcgcgaaaaatacggcagaggatgggccttctgcgggggatggacccgcagagggcttttttgcggcctttgggtatatctgcgggcggtttgccgcataatatatgcattttcttgtgttttccttatattgacatttgccgcagcgttcattataatcaaacagaatacgcggttttgtgcggttgtattgaaaaggaagtgtagaaagcatgtttttcacgagagacagggacttttacaaaacgctgatccgccttgcgatcccgattgcgctgcaaaatgcggtgaccttcgcggtgaactttgccgataacctgatggtcggctcgctcggcgacagcgcgatttccggtgtgtacgtcggaaaccagctccaaacgctgctgcaaatgtttgtcgcgggcatcgagggcgcaattttgatcctcgccgcccagtattggggcaagcgcgatacgggcagcatccggaagatcgcgtcaatcggcgtgcgcttcgccgttttgatcggcgtcctgatcacgctggtggcgttctcgttcccggtgcagattatggggatcttcacagacgacccttcggtaattgagatgggcgcgccgtacgtgcgggttgtctgcctctcctacctgttcttctgcatctcacaggtgatgattgcctcgatgcgcgcggtggagacggcgaaaatcggcctgtacgtctcgtttgtcgcgctcgcagtcaacgtttccttaaactatgtgctgattttcggcaagctcggctttccggcgctcggcgtgaccggcgccgcgattgcgacgctgatctcccgcatcgtcgagtcggcggtcatggtggtgtacgtccgctttgtcgaccgcaagctcaacctgcgctttcgcgacctgctccgcagtgaccgccgcctgacgcgcgacttcatccgctacggcatgccgatcgtcggcgggcagatcgtgtggtcggtcaacatgatgggccagacgatgatcctcggccgcttcgacgcgggcgtcatcgcggcgacgagcatcgccggcatgctgcacaacatgatgtatatcgcgatgaacggcttctcgagcgccgtcggcatcatcacgggcaagacggtcggcgcggggcgcatcgacaagatccgcgagtattcgcgcacgacgcaggtcattttcctcggcatcggcctgctctcgggcatcgcggtgtttctgctgcgcgacccgtttatcagcctgtacaacgcaagcccggcggcgatcgagtattcgcgccagtttatcaacgtgatctcgatcacgatcatcggcacctgctatcaggcggcgtgcctgttcggccttgtgaaatccggcggcgacatcgcgttcgtctttaagaacgacacgatcttcgtctttcttgtcgtgctgccttccgccatcattgcctcgtatctcggcgcgccgccctgggtggtgttcgcgtgcctgaagtccgaccagattttaaaatgctttgtcgcggtcgtcaagatcaaccggtacaactggatgaagaacctgacgcacgacagtgcggaggcagaagcctagccgccccgtttcggggtgcggcgggcagcgccttttccgggcggggcgcccggcgcatcaatttccacagcgatggagggacgatcgatttgaaacgattcaggggcgcgctgcttttgacgctgaccgcgctgatttggggcacggcctttgtggcgcagagcctcggcatggaccacctcgggccgtttacgttcaacggcgtgcgcaactttgtcgcggcgctcggccttttgccggtcattttgtttctgcgccgccggcagggggaggaagggacggacggcgcggcgccgcggtcccgcaaaacgctctggctcggcggcgcgctgtgcggccttgcgcttggcgttgcatcgagcttacagcagatcggcattcagtacacgacggtcggcaaggcgggctttctcacggcgctttacatcgtcatcgtgccgctgctcggcctgctctttaaaaagcgcgtcgcgctgcccgtgtgggtcagcgtcgtgatcgcggcggcgggcacgtatcttctgagcatcaaggaggatttcacgatcggctcgggcgacttattcgtgattctctgcgcggcctgcttctccgtacatattctgcttgtggaccgcttttcgcccgctgtcagcggcgtggagctctcgtgcgtccagttcctcgtggccggcgcgttttccacagccgtggcgttccttgtggaaacgcccgacctgcacgacatactcagaagctgggggccgatcctgtacacgggcctgatctcgagcggcgtcggctacacgttccagatcctcgggcagaaagacacgcagcccgcggtcgcctccttgattatgagcctcgaatcggttttcgcggcgctttccggctggctgctgctcgggcagggcatgacggggcgcgaggcgttcggctgcgcgcttgtctttgcggcggtcgtgctcgcgcagatcccgttttccgcgctgcgcggccggcgggccgcccggaaaaagagcgcgtaaaggcccgcgggggcttcctttttccggcggggtgtggtatagtgtaggtaaaggatgccgcgcggaaaaccggcggcaatgaaaggattggtattgaaatggcttcgttacgcatgattaaagtgaaaaactacgacgagatgagcgcgctcgccgcgagcatgatcggcgcgcaggtgctcttaaagcccgaaagtgtgctcggcctcgcgacgggttcctcgccgatcggtacatataagacgctggtcgagggctgcgaaaagggaattctcgatttctcccgcgtgcagacggtcaacctcgacgaatactgcggcctctccggggagaacccgaacagctaccgctactttatgaacgacaacctgttcgaccacgtgaacatcgacaaggcgaacacacatgtgccgaacggctttgcggaggatctcgaggccgaggcggcccgctatgagtcgttcatcgagtcgctcggcggcgtagacctccagcttctcggcatcggccacaacggccacatcggcttcaacgagccgacggaccatttcccgacggcggtgcacacggtcgcgctgaccgagagcacgatcaacgcgaacgcgcgcctcttcgagcgccgcgaggatgtgccgacgcaggcgatcacgatgggcatcggcacgatcatgaaagcggataagatccttctgattgcgggtgccgacaaaaaggcgatcgtcgagaaggcgttctacggcccggtgacgccggaagtgccggcctccgtgctccagctgcacaagaacgtcacggtcatcctctccgaaaactaaacagagccgcgtgccgcggttttccgcgggcgtgaaaaaagccgcggggtcccgtttttcgggccctgcggctttctgctttcacaggtcgagcttttcgagcagcgcctgcgtttcccggtcgacgcggtcgtaatcgacataggggcggtagagcgtctcgatcgcgtcgtgcgtgcgcttgcacaggcgcagcgcttcgacggcgcgggcggtgagcaggtcggcctcgtgcagcgcaaaggagacgaattccggaatcgggctgagcagaaattcattcagcgtgctgtgcgtgtcatccacggcgcagagcatcgtgccgctgtccggcaggcggatgcactggggcagctccggcgtgaggaaatccagaaagacctcggcgcgcgtgccgtccgcgagcgctgcggcctcgcgcaggaacacggcgccgaggatgccgggcagaaagaccgtgttgtctgtgccgacggtttcgcgcaggtcgatgacgccgccgggcgtcggcgtgcgcaggaacaaggtgcgcgtgccgccgggcgcggaaagggggaagccctcgcgcaggaaggcgcggatcatcggcaggtcggcggagcgcgcggcgtccgtcacggcggcgcggcgcagcgtgcctgcggcgctgaggcacgcgaaggccgcgctgtaatgcgcgcggttttccgagagcagaagctgcagctcgccgcgccgccgcgcgaaggcctcgcggtgcagaaagtgcccgaggttcaaaatttcgccctccacaccggggacggcggggtccaccgtgtgcggggcggtgccgtccagaaggacaatccctttctgcgggatgcgcacggcgtctaggctttcggggtcgctcgagcaccggaattcctccacagcaaagccgtttgcccgcgcgaggcacgatacctttttcatcagcgtgttcttgcccacgcccggtccgcccttcaggatataggtgtagtgcggcttttcccacggcggcacgatgctttcaaagtgcccgatgaagccgcggccggtgtttgcgcccggaaaatatttcttagtcatggttcggaaccgtcctttctgcgtattcaaaacaatatatgcggcggtatacgccgccatgataaaccgattctgccgttttgcgcggaaaataaacgcagaagccccagaattttttacattttccgcaggagcgctcgtattgaattgttctgccgggtgtgttatgataatataaatgttcagatgaaaacagtgtgccgcggcgctttgcctgcgcggcgcgcgaaaaggagaaacgaagattccgcagcggcgcgcagaaaggcgccgtggaaaggatgggttacgcatgagagtcggactggacgtcggctcgacgacgctgaaatgcgtcgttttgaacgaccagaatgagattttattttccaaatatgagcgccacctctcgcgcatcgtggagaaatctgtcgaaatgctccgcgaggtggaggccgaatttccggatgaaaaggtgctgctgagcatttcgggctccgcgggcatgggccttgcggagcgcagcggcatccagtttgtgcaggaggtttacgccacgcgcattgcggtgaaccggcttgtgccgggcacggacgcggttatcgagctcggcggcgaggacgcgaaaatcctctttttgacggacggcagcaacaccgccggccttgaggtgcgcatgaacggctcctgcgccggcggtaccggcgcgtttatcgaccagatggcgacgcttttgaacgtcacgccggacgagctcaacgcgctcgcgaaggagcacgagaagatctacacgatcgcctcgcgctgcggcgttttcgcaaagagcgacatccagccgcttttgaatcagggcgcgctcaagaaggacgttgccgcgagcatcctgtacgccgtcgtgaaccagacggtcgcgggtcttgcgcagggccgcgagattgcgggcaaggtcgtctacctcggcggcccgatgaccttcctctccgagctgcgcgccgcgtttgacgacacgctcggcatcaccggcatctgtccggaaaattcgctctatttcgtcgcgctcggcgcggcgtttgcggcggacggcgcggccgtgccgctcaaaacgctgatcaacagcatcgcccactacacggcgaaggaggagtaccgcgcctgtccgccgctctttaaggatcaggcggaatacggcgcgtttctcgagcgccacaacaaggcgggcgtcacgatccgcgacggcatctgcaacggcgagccggtctttatcggcatcgacgccggctctacgacggtcaaggcggtcgttacggatatggacggcggtgtcgtgtgcacgcgctacatgccgaacagcggcaacccggtcccgctgatccgcgaatttttgcaggaggtttacagccgctttccgacggcgaagatctgcgccgccgcggctacgggctacggcgaggacatcatcaaaaacgcgttttccgtcgattacggcatcgtcgagacgatggcgcatttctacgcggcgcgcgcgttcaacccgaaggtcgatttcatcatcgacatcggcgggcaggacatcaagtgctttaagatcggcagcggcgtgatcgacgatattttcctcaacgaggcctgttcctcgggctgcggctcgtttttgcagacctttgcgggcgcgctcggctattcgatcgaggagttcgcaaagctcggcctgttcgccgaccgcccggttgacctcggctcgcgctgcacggtgttcatgaattcctcggtcaagcaggcgcagaaggacggcgcgaccgtcgaaagcatctccgctggcctctcgatcagcgtcgtcaaaaacgcgctgtacaaggtgatccgcgcggttgattcctcggccatcggcaaagagatcgtcgtgcagggcggcacattcctgaacgacgcggtgctccgcgccttcgagcaggaaatcggacgcgacgttgtgcgcccgacgatcgccggcctgatgggcgcctacggcgcggcgctgtacgcgcgcgaaaagacgctcgcaaagggcggcgagctgccgacgtccacgctgctttcagccgaggcgctcgacgagttcacgcacagcgtcaaggcgattacgtgccacggctgctcgaacaactgcaagctgaccgtcaacactttctcgggcggccggaagttcatcagcggcaaccgctgcgaaaagccggtcacgggcgtgaagtccactgagacgaaatacaatatgttcgaagaaaagcgcaggcttctggctcgctatacgtacaaggacacgggcaagcctgtcatcggcatcccgatgggcctcaacatgtacgagctgctgccgttttggcacaagttcttcacatcgctcggctacgatgtgatgacctcgccggcttcgaaccgcgcgctgtacctcaagggccagcacacgatcccgtccgacacggcgtgcttcccggccaagctgatgcacggccatgtcgaggcgctgctcgacagcggcgtggacgcgatcttctacccctgcatgtcgtataacttcgacgagggcctgggcgacaaccactacaactgtccggtcgtcgcctattacccggaggtcatttcctcgaatatcccgaagctgaaggaaaccgttttcatcggcgactacgtgggcctgcaccgccgccgcgatttcccgggcaagatgtacgagatcctgcgccgccgcctgaagggcgatttcacaaagcaggatgtgaagaaggccgcggacgccgcctacgccgaatatgacctctacatgcgcgcctgccgcgcgatcggcgacaagttcttgaagctcgccggcgagcagaacaagccggttatcgtgctggcggggcggccgtaccacatcgaccccgaaatcaaccacggcatcgacggcctgatctgcgactgcggcgcggtcgtcgtcaccgaggacgccgtttccgcgaaggtcgagaagttcccgaccggcgtgctcaaccagtggacgtaccactcccggctgtacgcagcggcaaaatacgtcgtcggtcaaaacgacaggcgcgtgaacctgatccagctcgtttcgttcggctgcggcgtcgatgcgatcacgaccgacgaggtgcgctcgatcctgcacgacggcggcaggatctacacccagctcaagatcgacgaaatcacgaacctcggcgcggtgcgcatccgcctgcgcagcttgttcgccgcactcgacctgctgtaagccgggcgcgggaaaagccccgcgcggcgcccggccccggattcccaaagaaaggataggcttttgctgtgcgaaagccgcggttatcaatatggacgctgcaaaacgcgtggaattcacgaaggaaatgaagaaggattacacgatccttgcgccgaatatgctgccgatccacttcaagctgtttgaaaacctctttaaggcctacggctacaatgtggagatcctgcagacgcgcggccgccagatcgtggacgagggactcaaatatgtgcacaacgatacctgctacccggcgcttctgacgatcggccagatgatggacgcgctgcacagcgggaagtacgacctgaacaagacggcgctgatcatcacccagacgggcggcggctgccgcgcctcaaactacatccatctgctgcgcaaggcgctcgaaaaggacggcctctcgcatatcccggtcatttcgctgaacctctcgggcctcgaaaagaacagcggctttaagctgacgctgccgatgatccgcaaggcgctcgcggtgctggcttacggcgaccttctgatgctgatgcacaaccagacgcgtccctatgagcaggaggccggcgcgagccgcgcactggtcgacggctggaccgaaaggctgaccgcgatgttcgcggaggataagggctacaccgcaaaggaaatggagcgctatctgccgcagatcgccgccgatttcgcccggctgcccgtgaccggagagaagaaggtgcgcgtcggcgttgtcggcgagatctacgtcaagtattcgccgatcggcaacaacgatctcgaggagttcctgttctcgcagggctgcgagacgatggtgccgggcgtgatcggcttcatgctcttcaaggtggacaaccgcatggaggacatcaagctgtacggcggcagccacgcgaaatacaaggtcgtcaagatcatgttcgattatcttaccggcatcgaaaagcacgtgatccacgcggtcgagcatgcgaatacaatctcaaaccgcttcacggtgccctcggcctacatgcacctgaaaaagctgatcgacggcgtgatcggctacggctgcaagatgggcgagggctggctgctgaccgctgaaatgatggagctgatcgagagcggctacccgaacatcatctgcgcccagccgttcggctgcctgccgaaccatatcgtcggcaagggcatgatccgcaatctgaagaacctgtacccgcggtcgaatatcgtcccgatcgattacgacccgggcgcgacgaaggtcaatcaggaaaaccgcatcaagctgatgctcgccgtggcgaaggaaaacatggagagcgcagaataaaaccaaacgcgtgcctttggcgcgcattttttgcagggataggatgcccgaacggaaaggaaagcgcagaagatggaggttctttacagcgaaagactggcgcaggggcggcgggaatggccgtgtatgccgatcgaaatccagccgcggcagatgcactggtacggcgcggactggtatctgcccgccgtgtacggctgtgcgcagggcatggtgctcgatctgtttgcggccgtgccggaggcggaatttgaggcgtaccgcgaaaaatggcaggcgaggctcgagcggatgcggggggagcgcagccgggtgctgcgcgagcaggccgaggccgagaacccgctttccatgagagttgactgcaccgtgcggatcaacggcgaggcggtctcgcgctatgaaagccgcggcgccgtgtgggtgcgcggcgcgtcggaaaatgcggaagcagcggtgctgctcgcacattacggcctgatcgaggcgcacccgggtatggcgtggcggcacatgcgcgtgcagctcgcgtgggccgcatcggggcagccggaagcgctgcgcagcctcacggcagtgctggaggctgagcctgcggtgctgccgtgtccggcggtgtttgaaacagcgccgggctgcgcgccgttcgacgtgccgttctcgctgcctgcgggggcgcagcacacgctgcacgtgctcggctgtgaacgggatcgggcggcggagcttgaggacgaggcgttctgctggccgcgcgagctgtgcgtgctgcggtacacggtttcgcccgcgctgccggaggggttcacgctgcgcccggtggatcaggcgcagggcgattcgccgcggcggctgaaggatacgaaagacggcaggatcggcggcgcggtgggcgtcgcggttctgcggtcaaaggacgaggatgaggcggcggcctcgtcgctgtaccacgatgcgccgcagtcgatccgctggtacctgcggatcgaccgcatccccgccgagccggtggagcttcgcctgctgtagccggcggcccgcacgcagaaaaaagctccgcgcgtcccagagacggcggagcttttctatttttttcgtaccggaggaaaccgttcgagcagcggcaggagcaggcgcagaacgaggccggtgcaaaagccgcagacgacggaaagggggagcatcgcgggtatgtagaacagcgcggcgcgcccggtcaaggcgagtgcgacggaaagctgcgcggcattgtgtgcgagcgcgccacacacgccggtgagaagcagggaaaaacgcgtttttttccagatgagccacatcgcgagcgtgctcaaaaggccgccggataggctcatcagcccggcggtcacgccgcgcgtaagaaacgcaaacatgcctttgacgagcgcgacggcgagcgcatacggcaggccgagcgacccggccgcgaacatcgtcgcgatgtttgaaagcccgggctttgcgccgggcggcaggccgggcagcggcggcagcatgccttcgagcagcgcgagcacgagcgccagcgcgccgagtaggccgcagacggcgattttctccgatttttttcgcatgacggcctccttttgccggggtgcggcagacgtttcggtgcagagaggcgcagatcgcgcctgaaatcagccggtcatagcgtcggcgccgccgtctccggtgatgcggatgctgacgcgctggggcaggcacacggcggtatcgcccgcccggctgcacagccctgcgcgcacgcagacctgatccgggcaggggctcgtgacaaatctcgcgccttcggggcccacctcgatgacggtatccccgacggagagcgtttccgtctccgagagggaggcaaaggcgatgcggtgcagcgttttgccgtcctgctcgattacggccgtgccgccggttgggcgctggaggccgtgcaggtacagggcggcggccagcgccagcaggatgagcaggcagaggatttcccggcgggtgatcctgcgcttttccatcagagcgcgggcggcacgtcctgcgcggagccttcaacagcgaaggtcagcgcttcggactccagcaggtaggtgagcgcgtcgccctcggaggcggaaagcgtgagcaggccgtccgcgaggctgtaggcgacggagccgctcatctgtgccggctcgaagctgtcgctcgagagcgtgtaggtgatgcgcgcgccgtcggccgagtaagtgcccgcgccctgataggcaatctcgctgagataccagccggccatataggacattgtgccgtcggcgttaaaattcagcttgaagatgaagtgctcgaagccgctgctttccgaataggcgacccaagtgcagccctgtaaggctgccgccgggtcgggcgtgggcgatgcggtcggcgtcggctctgcggtgggcgcgggcgtcggttcgggcgttgcgtcctgtgctgccgtcggcacaggcgtttgcgtggcggacgatgcgccgtccgcctcctgccggagcgaaaacagggtcgcgcagccgctgaacgaaagaaggagcgccagcgcgcaggccagcgcagcgatgtgctttttcatgttcgtttgccttcctttgctgtagattatgccgagagcgtgtagccgtcggcggagagcgtaaagcgatccttcaggccgtcggtcacggtgatcacgccgctttcatcgatgaaaatgccctccgcgccgcagctttcgagcagcgcgcggccctcctcgaggccgagcacgaagcaggccgtcgagagcgcgtcggcgcgcgcaccgctgtcgcagagcaccgtcacggaaacgaggccggtttcggccggatagccggtttcggggtcgagcaggtggtggtacgtttcgccgtcctgcgtgaagctcttttcatagctgcccgaggtggagagaaagccggaatcgatcgcgagcgcgccgagcgcgccgtccgactttgggtcgcgcacggcgacgctccacggcgcgccggaggctttcttgccgaacacgccgacactgccgccgacggagacgatcgcggcttccgcgccgttttccgcatacgcctcgaccgccgcgtcgcaggccgcgcccttgccggcgccgccgaggtcgaccgcattgccgagatttttcagcgaggcggttcccgcatcgggatccagccgcaggaaagcgtagccgacgttcggcagcagctcggcgatcttatcgctgtccggcacggtacggcgctcgctgtcgaaatcccacaggcgggagatcggggcgatcgtcacgtcgaaggcgccgccgctcttttcggctacatcctgcgcaatctcgaggatctccatcgtgctttcgccgatctctacccagtccttgccggcggcgttgttcagcttttggatatcgctgcccgcaacgcgccaggagatctcgttttccagcgactgcaccgcgctggcggctgcggctgcggccgcctcgctgttttccccgtagacgctctgctgcacgtagctgcccatcgcgtaggtggtgacctcgtagggtgtttccgcgcggtcgagcagcgggaacagggcgatggcgatgacgagcagaagcagcacggcgccgagaatcagcgcgagctttttggcgttttgttcggataaattccggaaggttgtcttggtcggtcgtgctttcatgggcttcgcgtcctttcttgcctgccattttaacacaaacggcggggaaagtccatacagcgctttacatgcggcggaaaacacggtaaaatagaaaaaacggcctgcccgtcaggcgaaaaggggaggggatttcatgcggcggaacgcctgctgttttacagggcacagggcggttgcgcccgccgaccgggcgccgctgcaaacggcgctccttcgggaggtgcaggcgctttatgcgcgcggcgtcactgcgttttatgcgggcggcgcgcgcggctttgacacgctcgcggcagaggccgtgctccgtgcgcgggagacgctgcccgtcgcgctgcacctgctgctgccgtgccgcgaccagtgccgcagctggccgccgggcgaccggctgcgctatgcggagattctgcgccgcgccgattccgtgcggtacatcgaggcggcttacacggcagactgcatgcgccggcgcaacgacgcgcttgtggcggccgcggggtactgcgtctgctatttgcagcacgaccggggcggaacggcgtacaccgtgcgccgggcgcgcgccgccggtctcgagatcatccacctgatgacggccgacccggtgcagacggcgctgccgggcgcagaataggaaaagaggcgcgccaagcggcacgcctctcctcctgaagggataaaaaatgaaaaatataaaaggtcgataaactctgatgaaacgagccttatgcccggacgcggccgattgcggcaatgatgatgtccgcgatgtcgtccgtctcaaactgcgaggaatcgatcgtcaggtggtaattcgagagatcgtcccagcgcttgttcgagtagaaattgtagtagttcgcgcgctgtttgtcgcgttttgcgatgaaatcggagacctttttctcctcgcacagccccttgcgcaggattcttgcgacgcgtgcgtccttgttcgcgtggatgaaaacgcggaacacgttcttgtaatcgcgcaggatatagtcgccgcagcgcccgatgacgacgcacggccctttgtcggctgcgctcttgatgatgtcgctttgcaggatgaacagcttgtcgttgatcggcatctcgttgatgcctgtgatgcggctgccgaaggtgtagttgcccatgaccatggagtacaaaaggctgcttccggctttctcatctgctttctcaaagacctcctcgctcaaaccgctcttctttgcggccatcgcgatcagttccttgtcgagaagggggatgttcagcttttcggccagtcgttcgccgacctcgtggccgccgctgccatactgacgggcaatcgtgataatcggtaacatatgcacgcctcctcggtgttttgccggtgcggaacagcacggcgaaattgttgaaaacacgctaaatatacatgcgatatacatgaaatatgtgtattttctatagttatcctactccaattttcccggaatgtcaacaggcagaacaggttttttattctaaaaaagtgcgaatcgttaaaatacttcaaaaatataaaactattttgtgcaattaacatacgaataaccggaggacaggcaaaattcttcgtcggttcttcacaacattttcacattttgcgtgtatactgagagacacaagggcagagagaaaggcagggatgcggtatgtacagaattctcgtagtggacgacgaggcgaagatccggctgctcatccggaaatacgccgagtttgagggaaacgaggtgaccgaggcggaaaacggcatggaggcggtgaacctctgccgccagagccccgaccggttcgacatgattatcatggatgtgatgatgccggagctcgacgggttttcggccgtcgcggagatcaaaaagatcgcgtcgccggccgtcatcatgctttcggcgcgcggcgaggagtacgacaagatccacggtttcgagctcggcgtggacgattacgtcgtcaagccgttttcgcccaaagagctgatgatgcgtgtcaacgccgtgatgaaccgcgtgcgccgcacgggcggccagaagcgcgatgtctttcgcgcggaggggctcgaggtcgatttcacggcgcgcaccgtcacggtggacggcgcgcgggcggacctgtcgccgaaggaatacgacctgcttttctacctcgtcaataaccgcggcatcgcgctgacgcgcgagatgctgatcacgaacgtatggggctacgatttctacggggacgaccgcacgctcgacacgcacatcaagctgctgcgccgcagcctcgggccgtacagccggtttatcgtcacgctgcgcggcgtaggctaccggtttgaagcgggcgcatgaggccgcttgtgaggcggctgaaaaggcccggcatccgcgcgcaggtgctgctcggctttaccgcatttaccgcgctgatcgtcgcgctgctctggtttttccagatcggcctgctcaacacgttctacaaggcgatcaagacgaatgagatccgcgccgtttcgaaccgcgttgtcgaaatgctggacagcggcgcttcgatggccgacttcatcgagatcacctatagcgcgaacgtgtcgatccttctggccgacaagaacggcacgaatatctcggtatccccgaacgcgcgcggcagcgtgctcgagcggttcgacacgatagactgccgcatgcttttccttgaggcgaaggcggcgggcggcagcgtgctcgaggacaatctggagcaggcggcgggcgatatcggcgcgggtattctctacgcgcagatcgtcacgctttcggacggcggcgagtatcttgtgctgctgaacagcagcgtcgtgcccgtcgattccacggtggagacgctcaaggtgcagctctggtgcctcaccgccgtgatgctgctgctcgcgctcgtgctggcgctgtttatcgccgcgcggctctcgaagccgatcgagcggatcaacgactccgcgaagcacctcgcgcaggggaattacgcgatccgctttccggagagcggcgcgcgcgaggtggcggagcttgcgggcacgctgaactacgcggcggcggagctttcgaaggtggaggacctgcggcgcgagctgattgcgaacgtctcgcacgacctgcgcacgccgctgacgatgatctccggctacgccgaggtcatgcgcgacatccccggtgagaacacgccggagaacgtgcaggtcatcatcgatgaatcgaaccggctggcggacctcgtcaacgacctgctcgacctttcgaagctgcaaagcggcacgcagaagctcgcccccgcggtgttctgcctgacggaggacatcaaaaaaacgctgcaccgctacgataagctggccggctacagtttcccgtttagctttgaccgcccggtgtacgtctgcgccgaccgcctgcgcatctcgcaggtgctctataacctcgtgaataatgcgattcactacgcgggggcggacaaaacggtttcgctgcgccaaagcgccgcgggcggcgtcgtgcgcgtggagatcagcgacacgggcgagggcattcccgccgacaagctgccgtatatctgggaccgctactacaaggtggataaggaccaccgccgcgcgcagatcggcaccggcctcggactttcgatcgtgaaaaatatcctcgacatgcacggcgggcgctacggcgtcacgagcatggtggggcagggcagcacgttttggttcgagctgcccgaatacacggagccgcccgcgccgcgtggctgaccggcacggcgcttcccgcaccgcttttctgcgtcaaaatgctgccgtgcgttcctgctgcacagcgttttcagaccgttttgagccgcccggaaggcaccgatgctttttcgggcggctttttcggcgcaattcggggcgaaagccgcgtgttgttccaaattgcagaaaaagcgttcctgaaaatcctatattttcatccggaaaaatcgcgaaaatgcttgataaaagaatatcgatatgataaaatttattgaaccgagtttttcggatggcggcaaaaaccgcgcatccgggcgtcggcgcatgccctgcggcaggatgtttacataaaacggagctttcggcgcgggttttccgaaggcgcgccgccgcggcgcagcgcaaaaaaaccggtgcagccacacggcagattcaattatccaaaataaattatagaaaggatgacaggagtagctatgaagtacagctattatccggggtgcaccctgaagacgaaggcaaaggatctcgacgcctatgccagagcttctgcaaaggcgctgggattcgagcttgaagagatcgaaaactggcagtgctgcggcggtgtttacccgctcggctccgatgagatcgcgacaaagctttcttcggtgcgcgctctgaatgaggcgaaggagaaagggcaggatctcgtgacgctctgctccgcatgtcatcacgtcatcaagcgcgtcaacgatgacatgaagaatgtggaggatatccgcacgagggccaacaactacatgcagctcggcgagccctatgcgggcgagaccaacgtgctgcatttcttggaggtactgcgcgaccgcgtcggcttcgacgaactcaagaagaaggtcacgaaccccctaaagggcaggaagatcggcgcctattacggctgcctgcttctgcgccccggcaagctcctcgagtttgacgacccggagaatcccacgattatcgaggatttcatccgcgccatcggcgccgagccggtcgtttacccctaccgcaacgaatgctgcggcggctatatctccctcaaggaaaaggatatgtcgaagcgcatgagcgcgacggtcatggagagcgcggccggcatgggggcggagatgctcatcacggcatgtccgctctgcatgtacaacctcaacaagagcggcagcggggccatcccggtctactatttcaccgagcttctcgcggaggcgctcggcgtcaaggaggaggcggcaacgaagtgaacaacgcaaagaaacaggcgcaggagatccgcgagatcagcggcgtcaacccgtataagtgcatgaagtgcggcaagtgctccgcttcctgcccgtcgttcaatgaaatggacatcaagccgcaccagttcgtctcgtatgtgctgaacgatgagatcgaggcgcttatgaagtcggaatcgctctggaagtgcctttcctgcttcgcgtgcgtggagcgctgtccgcgcgatgtaaagcccggcaagctcatcgacgcggcgcggcagctcgtggtgcgccagcgcggcgagacctacctctcgcccgacgaggttccggagcttctcgacccggacctcccgcagcagctcttagtcagcgcgttcagaagatacaggaggtgatagcgtgcaaagaataggagtttttgtctgccactgcggcagcaacatcgcggccacggtcgacgtgaagaaggtcgtggagatggcccgccttgagccgggcgtcgtgcacgcggaggattaccagtatatgtgctcggaggtcggtcaggcgaagatcgccgcggcgatccacgaaaagcacctgaccggcatcgtggtgtgttcctgctcgccgcgcatgcatgagacgaccttccgcaaggccgccgaaaaggctggcctcaacccctacatggtggaaatcgccaacatccgcgagcactgctcgtggattcacaagaatatcgaggaggccaccgaaaaggctgtgatcctcgcgcgcgcagcgatcgcgaaggtcaacctcgacgcgccgctcgtcgcgggtgaaagccgcgtcacgaagcgcgcgctcgtcatcggcggcggcatcgccggcatccagaccgcgctcgatattgcggacgcgggctatgaggtcgacatcgtcgaaaagacgccgagcatcggcggcagaatgtcccagctcgacaagacgttcccgacgctcgactgctccgcgtgcatcctcacgccgaagatggtggaggcttccgcgcacgagaaaatcaacatctacacctacagcgaggtcgaaaaggtttccggcttcgtaggcgatttcacggtcgacatccgcaagaaggcgagaagcgtcgatatgacgaaatgcaccggctgcggcctgtgtcaggagaagtgcccctcgaagaaaacgcccagcgagttcaaccgcgggctgggcacgagaagcgccatctacacgccgtttgcgcaggcgatcccgaacgtgccggtcatcgaccgcgagcactgcatcaagtttaagaccggcaagtgcggcctgtgcgaaaaggtctgtcaggcgggtgcgattgattacacccagaaggatgagatcatcaccgagaagtacggcgcgatcgtcgtcgcgaccggcttcgatacgattaagctcgataaatacgacgaatacgcgtacagccagagcaaggacgttgtcacgtcgctcgagctcgagcgcattatgaacgccgcaggccccacgaagggccatctggagcgcctttccgacggcaagccgccgaagaacatggtgttcatccagtgcgtcggcagccgctgttccgacaaccgcggcaagagctactgctcgaagatctgctgcatgtacaccgcgaagcacgcgatgctgatccgcgacaagtacccggacgtaaacgtgacggtgttctacatcgacgtgcgcacgcccggcaagaatttcgatgaattctaccgccgcgcggtcgaggattacggcgtcaactacgtgaagggtcaggtcggcaaggttgccccgcagccgaacggccagctcctcgtgcagggcgtcgacctgatcgacaacaagcagattctcatggaggcggacatggtcgtcctcgcaaccgccattgagccggacccgtcggtccgcggccttgcgacgatgctcaccgccagcatcgatacgaacaacttcctcaccgaggcgcatgcgaagctccgcccggtcgagtcgcccacggccggcgtgttcctttccggcgtgtgtcagggcccgaaggatattccggagacggtcgcgcaggccggcgccgcggcggtcaaggccatcggtctgctcgccaaggataagctgatgacgaacccgtgcaccgcgaagtccgacgagctgctgtgcaacggctgctcgcagtgcgcgaacgtgtgcccctacggcgcgatcagctatgagacgaagctcatcaacgaccacggcatccgcgaggagcgccgcatcgcggtcgtgaacaacgcgctctgccagggctgcggcgcctgcaccgtcacctgcccgtccggcgcgatggatctgcagggcttctcgaacagacagattcttgcggaggtggatgcaatatgtcgataacagcgaacgaagaattcaagccgaagatcgtggccttctgctgcaactggtgcagctacgccggcgcggatctcgcgggcagcagccgcctcacctacccggcggacgtcaagatcatccgcgtgccgtgctcctgccgcgtgaaccccatgttcatcctgcgtgcctttgaaaagggcgcggacggcgtgatcctgtgcggctgccacccgggcgactgccactacagcacgggcaactactacgcgagaagaagaatggcgctgctcttctccatgctcgattacatcggcgtggagcacggccgcacccgcgtggaatgggtctcggcggctgagggcgtgaagttctcccagaccatgaacgagtttgtggagaagatcacctcgctcggcaaaaacgtcagactggaggatttgagatgcaggaaataatcaaccgcgcaaaagagcttctggcggatggaaccgtcgttcgagtcctcggctggaggatcggcgacctgccgtacaatccggagccctcctactttgagacggcggaggatctggaagcgaatttcgtgtacaacggtttctgcggcgcgaacctgagcaagtacatgatcgagggctcgaagctcgagggtaagacgctcgtctttctgaagccgtgcgatacatacagcttcaaccagctcatcaaggaaaaccgcgtggaccgcgaaaaggcctacatcatcggcgtcggctgcaagggcaagctggatgtcgaaaagatcaaggcgcagggcgtcaagggcatcctgagcattcagggcgcggagatcgaaggcgacgccgacgtgctcacggtggaaacgctgtacggcgagaaaaccgtcccgtataaggacgcgatgctcgagcgctgccatgtctgcaagggcaaggagcatatgatttttgacgaggaaatcggcgagagcgccgatacgaaggacgccgaccgcttccatgaggtcgaaaaaatcgaggcgatggagccggaggagaagttcgcgtatttccagaaggagctcagcaagtgcatccgctgtaacgcgtgccgcaacgtatgcccggcatgcagctgccgcaagtgcgtgtttgacagcacaaagttcgacagcgcgcagaaggcgaacgccgattcctttgaggaaaagatgttccacatcatccgcgcgttccatgtggcgggtcgctgcacagactgcggcgaatgcagccgcgtatgtccgcagggcatcccgctccacctgttcaaccgcaaatttatcaaggatatagacgaattttacggcgaatatcaggccggcgccgatgcggagtccaagggtccgctgacgagcttcacgttcggcgacgtcgagccgggtgtcaccgggggaaggagataagctatgtttaaaattgcaaagcgtaatctgcccgagctgctgaaagccattgcggcgacacaggagctttacctgccggtgaacatcagcggccagacgaattttgcggtctggaccgaaggcatggaagcggatcttgacacgctgaaaacggtcaagtccccgaaggatatgtttttcccgcagagcgaaacgctctatacggtcaagaaagagaataagaagctcgccattgagccggaagcgctcaagagccagcgctttgttgcgttcggcatgaaggcgtgcgatattcagggcatcaaggtgctcgacaaggtctttctcgccgagccggtcgatacattctacaaggcccgccgcgagcacggcaccatcgtggcgcttgcgtgccacgagccggaggaaacctgcttctgcaaggtgttcggcgtggactgcgccgagccggacgcggacgttgtgatgtgggcggtcggcgaggattactgctggaagcccgtgacggaaaagggcgaggcgctcaccgcgtccgtctccgcggtgctggaaagtgccggggcggaggacgaaaaggccgtcgcaggcgagcaggagaagatccgcgcgattgtcgaaaagctgccgtatacgaacctttcgctcgagggctgggacggcaatgccaccgaagaaaaattcaactctcccgtttgggaaaagctctataagccgtgccttgcgtgcggcacatgcacctttgtgtgccccacctgccagtgctacgacatcaaggactacgataccggccacggcgtccagcgctaccgctgctgggactcctgcatgtattcggactttacgatgatggcgcacggcaataacagaacgagccagatgcagcgctaccgccagcgttttatgcacaagctcgtctacttcccggcgaacaacgacggcatgtattcctgcgtcggctgcggccgctgcgtggagaaatgcccggcttcgctgaatattgtaaaggtcatcaaagcctttgaaaaggaggcagtcgatcaatgagtgaatgtacgtgccattgccacgataattatgtgaaggacgtcctgatcccgcaggtcggcgttatcaccgatatccgcgaggaaacgccggacgtcaagacgttccgcgtcaatgcgccggagggcggcaagctcttcgagcacatgcccggccagtgcgcgatgctctgcgcgccgggcgtgagcgagggtatgttctcgatcacctcctcgccgacgaacaaggaatatcaggagttcagcatcaagaagtgcggtatgctcaccgattacctgcacagccttgaggtcggcgacgagatcaccgtccgcggcccgtacggcaacaacttcccggtggatacggagctcaagggaaaaaacctgctcttcatcgccggcggcatcggcctcgcgccgctgcgttcggttatcaactacgtgctcgataaccgcagcgattacggcacgatcgacatcctgtacggctcccgctcgaaagacgacctcgtgcagctcaaggaaattcaggacgtttggatgaagaccgagggcgtcaacgtatacctcacgatcgaccgcgagcaggagggctgggacggccacgtcggcttcgtgcccgcttacctcaaggagctcggcttcgatacgaataagacggcgcttttgtgcggccccccgatcatgattaagttctgtctcgcgtcgctcattgagatgggcttttcgaaggagcaggtctacacgacgctcgagctgcgcatgaagtgcggcatcggcaagtgcggccgctgcaacatcggctccaagtatgtctgcaaggacggccctgtcttccgctgcgacgaaatcgacgagctgccgaacgaatattaagaaagggaatggcttaacatggaaaatatggtaaatgtatattttttcggtaaacgctacagcgtccctgcggatctcacgatcatgaccgccatggagtatgccggttatacgctgaaaagaggctgcggctgccgccacggcttctgcggcgcctgcgcgacgatttaccgcatcaagggcgataacgagcttaaaacctgcctcgcctgccagacgcaggttcaggagggtatgtacgttgcgagcatcccctttttcccgacggataagcgcctctatgacatcaacgagattaagccgaaccagcagatcatgatggagctctaccccgagatctacagctgtatcggctgcaacgcctgcacaaaggcatgtacgcagagcctcaacgtcatgcagtacatcgcctatgcgcagcgcggcgagctcgagaagtgcgccgaggaatcctttgactgcgtgagctgcggctgctgctcggtgcgctgcccggcgggcatctcgcacccgatggtcggcctgctcgcgagacgcctcaccggcaagtatatcgcgccggagacgcagcacctcaagaaccgcgtggaggagatcaacagcggcgcgtacgacgagctgatcgaaaaggtcatgcagaagccgatcgcggagatgcaggagctttacaacacgagagaaatcgagaaataaggagggttcgccatgtttacaccggaaatgctcgcctccgtcaaaaaggtagaggcaaccagagacgcgcgtatgggcatggagcccagacgcatgaccgcagaggagaaagataccctcctgaaggcgtatcacccggactatcgggaggacggcttcgacacgatcaagatcgggccgaataagggccagaaggtgccggcggagctcggccacctgctgcactcgaacagccgccttctgaaccacccggtcgacctcaacaaggtcgattacgatgtggatgtgctcgtcatcggcggcggcggcgccggcgcttcggcggccatcgaggcccacaatgcgggcgcaaacgtcatgatcgtaacgaagctgcgcatcggcgacgcgaatacgatgatggcggagggcggcattcaggctgccgataaggaaaacgactccccggttcagcattatctcgacgctttcggcggcggccactttgccgcgcgcccggagctgctccgccgcctcgtcatggaagcgccggacgcgattaagtggctgaacgagctcggcgtcatgttcgacaaggacgccgagggcaatatgattacgacccacggcggcggcacctcgagaaagagaatgcacgcctgcaaggattattccggcgcggagatcatgcgcactttgcgcgacgaggttctgaaccgcaagatcccggtcgtcgagttcacttcggccgtcgagctgatcaaggatgaaaagggtcaggttgcgggcgcggtgctcctcaacatggagaccgacgactacatgatcgcgcgcgcaaagacggtcattatcgccacgggcggcgcgggccggctgcattaccagaacttcccgacctcgaatcactacggcgcaacggcggacggcctgatcctcggctaccgtgcgggcgctccgctcctgtatcaggatacgatccagtaccacccgacgggcgttgcgttcccgtcgcagatcttcggcgcgctcgtcaccgagaaggtccgctccctcggcgcgatgctcgtcaacgtggaaggcgaagccttcatgcatccgcttgaaacgcgcgacgtcgcggcggcttccatcatccgcgagtgcaccgaccgccacaagggtgtcacgacgccgctcggcagcggcgtgtggctcgataccccgatgatcgagcgcatcggcggcgagggcacgatcgaaaagcgtatcccggccatgctgcgcatgtacatgaactacgacatcgatatgcgcaaggtgccgatcctcgtttatccgacgctccactaccagaacggcggcctcgagatcggcggcgacggcttcacgaaggcgatcgataacctgcttgtcgcgggcgaggctgtcggcggcatccacggccgcaaccgcctgatgggcaactctctgctcgacatcatcgttttcggccgcaatgccggcaaggctgccgcggcgaaggcgaaggagaccgagctcggcgcgatgacgctcgagcacatcgagcagtatgcgaaggagctcgcgaacgccggcatcgaatccgacgacgtttccccgctgctcctgccgaagtacgcccgccacgaaagataagcacagactgcgctgctccgggccgcctttgggtgagcccggtatgcgctttgcctgaataaggaaaggaagttgtttccagctatgcgtgaaattgaagtcagccagatcacagacgtcgtcgagcgcctgtgcatcgcggcgaacgagcacctgccggaggacgtaaagtgcgccatccgctcctgccgcgcctgcgaggacggcgagatcgccaagggcgttctcgacaacatcatcgaaaactttgagattgcggacaacgaatgcgttccgatctgtcaggataccggcatggcctgcgtatttctggagatcgggcaggacgtgcacctcaccggcggcgatctgaccgaggccgtcaatgagggcgtgcgccgcggctatgataagggctatctgcgcaagtccgtcgtcaaggatccggttcgccgcggcaatacgggcgacaatacgccggcaatgctctatacggagattgtcccgggcgaaaacgttaaggtcacggtcggaccgaagggcttcggcagcgagaacatgagccagatccgtatgttcaagccgtccgccggcctgcagggcatcaaggatttcatcctcgaggtcgtagagacggctggcccgaacccctgcccgccgatggttgtcggcgtcggcatcggcggcacattcgataaggcggcgctgctcgcgaagaaggcgctcatgcgcccgctcgattccgagaatcccgacccgttctatgcggatctcgaaaaggagatgctcgagaaggtcaaccagctcggcatcggcccgcagggattcggcggcaagacgacggcgatcggccttaatatcgagacgatgccgacgcacattgccggcatgccgtgcgcggtcaacatcaactgccacgtgacgcgccacaagacggaggtgctctgaaatggaaaagcatattaagctgccccttacagcggagcttgcaaagacgctccacgccggcgatacggtgtacctcaccggcacgatctatacctcccgcgacgccgggcacaagagaatgtgcgaggcgctggcaaagggtgaaaaactgccgtttgacccgacggacgcgacgatctactacgtcggcccgacgcccgcgaagccgggtcaggtcatcggctccgcaggccccacgacgagcggccgcatggacgcctatgcaccgacgatgatgtcggtgggcgcccgcggcatgatcggcaaaggcgcgcgcctgccggaggttgtcgaggcgatgaagaagtacagcggcgtctatttcggcgcgatcggcggcgcaggcgcgctgctcgccaagtgcatcaagagcgcggagctcatcgcgtatgaggatctcggcgccgaggcgctgcgcaggctgtacgtggaggagatgccgctcgtcgtcatcatcgacagcgagggcaacaacctctacgaggaaggccgcgcggcatatctcgcacagcacaaataaattgtctttgcagcaggaggcggaattgctccgcctcttgtttgtgcacatcaattctgacagaataaaaggggaatgaagcgaaatgacacctgaaatgattgctgagattctggaaaccatcatgattctcgccttcggcctttcctggccgctttccatctacaagtccgtgaagtcgagaaccgcgaagggcaagagcctgcagtttgagttcttcatctggctcggctacatcgcgggcatcgtgatgaagtgcatccagtgcttcatcatcggcaagagcggcccgattttctatctgggctgggtattctatgtcctgaactttgtcgagatcacgatcgacatgatcctctatttccgcaatgtcaagctcgacaaggagcgcgacgcagcggcaaaataaaaagcagttcagccggtcaatcaaaaagaagcggagagcatttgccctccgcttcttttttgcaaatacagcgttcggaccgccttgccggcgcggacagcttcactgctctgcacggcgctgcggagcggctgtgtcacgccccgcggcgggctttgtaatcttcgccccacgtccacagcgcgtcgagcaccggacgcaggctcatgccgagcggcgtcagcgcgtattccacgcgcggcggcacttcggcgtacacggtgcgcgtcagcagcccgctatcctccatggcgcgcagctgggcggtcagcaccttctgcgaaatgccgctgagcgatttttttagctcgccgaagcgctttttgccgggcagcagatcccgcaggatcagcactttccacttgtcgccgatcagcatcagcgtcgtttccaccgggcaggccggcagtgtttttaaagccatcgtatccggcataaaaaggacctccaaatcattgaaagactgctgggttcctaagcattatacgccaattttccgagcttgtcaaatataggggaagccaaaagcggcttataatctgaatagtatcattttggttcctatagcactttattgtgcttactttacaatagagcctattgagggtatactgtagacaagagatgcggagacggccgctccggtaggctcaaaaatcatcatgcagatacggaggaaacaaagatgaaaatcacagtggtttgtgcggcgggaaaacagggctcaatgctcgtgcgcgaggcgctctcgagagggcatgcggtcacggcagtcgtgcgggatgcagcggcagcgccggcgggcgccgatgtgctcgttcgggatcttttcgacctgacacgggaggatctcacgggaagcgatgtggtcatcgacgcattcggcgcgtggacgccggaaacgctgccgcagcacagcacctcgctgctgcatctctgcgacctgctttccggcacgcaggcacgcctgcttgtcgtcggcggggcgggcagcctgtatacggatgcggcgcacacggcctgcctcgcggaaagccccgattttccggaggcctttaagccgcttgcggcggccatggcggaggcgctcgccgcgctgcggaagcgggaggatgtgcgctggacgtatctctcgccggcggcggacttccgcgcggacggcgaaaaaaccggccgctactgcttcggcggcgaggagctcacactgaatgcgcgtggggaaagtgcgatcagctatgcagattatgccgcagccatgctcgacgaggccgagcgcggcgaacacatccggcagcgcatcagcgtcgtgggggcgtgagcggcgccggaaatctgagctgcgcgacaatgcggctgtctgtgcgcgtgcccccgcatgcgcattggcggctggaacatgggtgcagatatagaggagcgggaggcctgtcggctttccgctcctttgggctttgtctgagccgcgtcagacggcgggctcgcctgcggcgcggatcatctgctcgagcgcctttgcggcgaggctcagcgtctggtcgcggcgcttgacgaggcagacggaacgcggcgggaccggctcgagcagctcgatgacgcggatgccgcgctgcgccgcgtcgcccggcaggaaatcctcgggcacaaagccgatgccgaggtcgttttccaccatcggcagaatctggtcggccgtggcggcctccacgtccggtgcgagcgcaagcccgtgctgggagaaaaagcccgcgtagaattcgaaggttttggtctgcgcgccgagtgagacgaacgggcagcccgcaagttcgtgcagggcgcgcgggcgctcggcgagcgccgaaaaggcggggccgcagacggcgacctcgcggaaaggcttgatcggcacggccacgagcgagcgggcgggctcgagcggcgtcgtcacgaccgaaaggtcgacaaggccgcttttcagcgccgcaatggcctgcgtcgtcaggtggtttgtcacgcgcaggcggatgccggggtaggttcggcggaagctgcgcagcaccggcagaagcaggcagtgcagggcggtttcgctcgcgccgatcgaaacgctgccgctttgcagactgcgctcgagcgccagcgcctcctcgccggcctgaatctgctcgaaggcgatttgaatgtgtgcgtagagctgctcgccctcaggcgtgagccgcacgctgcggttggagcgcacgaacagcgtgcagccgagcgcgttctccaaattcttgacggcgcgggaaatattcggctggttgctcaaaagaatgtttgcggcctgtgtaaagctgcggtattttgcgacataatagaagatacggtagtaatcgtagctgatcagcatggcggctccctcaataatatcttaatgacataatataaatgtaagatatgtattttacatatgaataaatttaattataataggtgttggccggtaaatcaagcggcaaaacgatatttatgaggatttgagggataagaaatgagtgcttgggaaattgttttggttgtcgcgctctgcgcggtgcgcgtgctgctttccgtcgtgctcccgttttacagggagcgcagaaaggtggggcggtgatatgaagcgccgcagcccagccgggcagatgtccgacgcctacctgaccgcgctgtttctgacgctttcgggcggctttcaggacgcatacgcctactgcttccgcgggcaggtgttcgccaacgcgcagacgggcaacattgtgcttttgagcgcgcatcttctgcacggaagctgggggaacgccctgcactatgcgatcccgcttgtcgcgttcgtcacgggcacctgctttgccgagctgattcgcggcgcgttccgctatgcgcgccgcctgcattggcggcagaccatccttttgatcgagatcacgctgctgtttttcgtcggcttcatcccgattgacaacatcgcgaacgcgatgatctcgttcgtctgcgcgatgcaggtgcagtcgttccgcaagatgcgcggaaattcctatgcgagcaccatgtgcatcggcaatctgcgcagcggcacggagatgctctgcgcatttttccgcacgcatgagaggaacctgctgcgcgacgcgctgcggtacggcggcgtgatcctctcctttgcggcgggggcggggctcggaagcgttgcggcgctcgcgtggggcgcgccggcgatctggtgctcctgtgcgtttcttgcggtcagcttcgggctgatgttcctttccggcgaaaaatagggcccgcggggcaggaaagcgggggaaacgggcgcataaaccgcgtgcgtcttgacaaaactgttcgaaaaggctatcataatttccatggagcttatccgaatttttttgagaaagaagttgtaaagaatatgagcgaaaactgcacgcacgattgctcgagctgcggcgaggactgtccctcccgccagcagccggagagctttctcgcgcccatgaataagatgagccgggtgaaaaaggtcattggcgtcgtcagcggcaagggcggcgttggcaagagtcttgtcacctcgatgatgtccgtcacgatgcagcgccgcggcctcaagacggcgattctcgacgccgacgtgacgggcccgtcgatcccgaaatgcttcggcatgcacgaaaaggcgcagggctgtgaggacggcctcttcccggtcagcacaaagaccggcatcgaggtcatgagcatcaaccttctgctcgaggacgaaacggctccggttgtctggcgcggcccggtgatcgccggcgtcatcaaacagttctggagcgacgtgatctggaacgaggtagactgcatgttcgtcgatctgccccccggaaccggcgacgcgccgctgacggtgtttcagtccatcccgctcgacggcatcatcatcgtcacctcgccgcaggagctcgtctccatgatcgtctcgaaggcggtcgaaatggcgcagatgatgaacgtgccggtgctcggcctgattgaaaattacagctatgtcaagtgcccgggctgcggcgagccgttcaaggtgttcggcgagagccatatcgacgaggtggcggcgaaatacggcctgaaggtgctcgggcgcattccgctcgacccgcagatcgcctcgctgtgcgaccgcggcgtgatcgagctctttgagggcgactggctcgacgaagcggcggacgccgtggaggctgcgaagaaggaagcgcagaattcctgaaaaaacagttgacaacgcggcgcgaaccgagtatagtagatttattccagaaaattttatattccaaaagcgatgacgaagacggcgcggtccggtttgtttcagagagtcggcggctgctgcgagccgatacaaaaggaacgattgcccatcccttccgagctgaaagccccaaagccgaataggcgagtagatgctttccgagatgtgctgcgtcagtgcatagggcttcatgagagcccgaagagcggctccccctgcgggagcaatttgagtggtaccgcggattttgctccgtctcaaagtgatttgagacggagtttttttattcggagcggccgcttcgcctttggaaaacacaggaaaggaatgattgatttggcaaacgaaacacagacggcgagatctgaaaagacagacctcaaaacacagctcgcggaggtggcggagcgaatccgcacgatgcgcgagatcatgggcctttccgaggaggaaatggcgcagcggaccggcgtgacccccgaggaatacagacgctgcgagacgggcgagagtgatttcagcttcacgtttatctacaaatgtgcggagcgcttcggcgtggacccgaccgacctcatcaagggcgttagcccgacgctttccacctatacgatctcccgccgcggcgagggattgccgatcacgcgccgccacggcttcaagtacctgaacctcgcgccgctgttcaagcaaaagaccgccgaaccgttctacgtcacgatgccgtacaacgaagccgagcagaatgtcgcgatcaagctctccacccatcaggggcaggagctcgacatcatcgtcaagggcagcatgcgcgtgcaggtcggcacgcacgtggaggagctcggtgagggcgacacaatctactacaacagcgcgacgccgcacggcatgatcgcgaccggcggatcggactgcgagttttacgcgatcgtcatgcggcccggcgaggcgctcgcacccgaaaaggataagtttgccggcatcatcaaggcgaagctcgcccgcaccgagcgcgagacggtttcgagcccgttcgtgcacacggcgctcgacgaaaacggcatcttaaagtcgatcgagttcacgaacgaagagaaattcaacttcgcgttcgacatcgtcgaccggatcgccgagaaggaccccgaaaagctcgcgatgctctgggtctcgaagaaccacgaggaaaagcgcttcaccttcggcgatatgaagcgcatgtcgaataaaacggcgaattatttcaaatccctcggcatcggccgcggcgaccgtgtgatgctcgtgctcaagcgccactaccagttctggttctcgatcctcgcgctgcacaagctcggcgcagtcgtgatcccggcgacaaacctgctgatggagcacgatttcgactatcgcttcaaggcggcgggcgtgaaggcgctggtctgcacgccggacgggcaggtcgccgaggaggcgatgcgcgcggcgaagaacgtcgatgatgtcgagcacctcatcatggcgaacggtgcgcgcgagggctggctcgatttcgacgccggcgtggaggcgcagagcgacgttttcgagcgcacggcggacacggcctgcggcagcgacccgatgctgatgttcttcacctcgggcacgaccggctacccgaagatcgccgagcacaaccacaaatacgcgctcgggcacttcatcaccgcgaaatactggcacaacgtgaaccccgagggcctgcacttcacgatctccgacaccggctggggcaaggcgctctggggcaagctctacggccagtggatgaacgaggccgcggtgtttacctacgatttcgataaattcgatgcgcacgacatcctgccgatgttcaagcgctacaacatcacgaccttctgcgcgccgccgacgatgtaccgcttcttcatcaaggaggacctttcgaaatacgacctctcctcgatcgagtacagcacgacggccggcgaggcgctgaaccccgaggtgttcgagcagtggaagcgcgcgacgggcctttcgatctacgagggcttcggtcagacggagacgacgctctcgatctacaacccggtcggctccgtgccgaaaacgggctccatgggcgttccaagcccgctctatgatgtcgatctcgtcctgccggacggcacgcccgcgccggtcggcgagacaggcgagatcgtcatccgcactgacaaacacacgccctgcggcctctttatgggctactaccgcgacgaggaaaagacgcgtgaggcgtggtgcgacggcctctaccatacgggcgacaccgcgtggcgcgacgaggacggctacttctggtatgtcggccgcacggacgatgtcatcaagtcctccggctaccgcatcgggccgtttgagatcgaatccgtcatcatggagctgccgtacgtgctcgaatgcgccgtcacgagcgcgccggatccgatccgcgggcaggtcgtcaaagcgtcgatcgttttgacgaagggcaccgagggcaccgaggcgctcaagaaggagatccagacctacgtaaaaacgaatacggcaccgtataaatacccgcgcatcgtcgaattccgcgacgagctgcccaagacaatcagcggcaagatccgccgcgtggagcttaagggctgagccggagcaggaaaaacgcagataagccgtagaatgtccgccgcattggttttgccgtgcggcggctttttgcgcgcgtttatagaaaattaacgcgccgttcacagtttccttgcggggcaatcctataataatactggtaatttgtgcagaaacaggagatgccgaccatgccggtgcaaaacatcgtgcgcggtgtccggcgggaaaggaacggcgtgcgtatggagagcgagaatgcgatttttaagaggaacggccgcgttttgatggtcgtcaacccctgtgcggggcgcacgaaagggcttttgtacgccgacctgctggaaacgcgtttgaagcgcgcaggcgtgccggtcgtccgctgcgagacgacggcggaggaaaacggcgcgggctatgccgcggccgccgcgcaggccggctgcgggcggattgtctgcatcggcggcgatggcacgctgaacgccgtgatcaacggcatgctcggcgccggcgtgcggctgcccatcacctacattcccgcgggcacgacgaacgacttcgcgcgcacactgcgcctgccccgccgcatcggcgatatgcgccgcgtgctgacggcggggcgcgacgtggagatcgacgccgggcgcttcaacgacggctatttctcctacgtcgcgtcgttcggcgcgttcacgaagtgctcctacgcgacgccgcgcagcatgaaacgcctgctcggccacctcgcctatgtgctcgagggcatcaaggacattgcggcgctcgaggcgcgcccgatgaccgtggagacggacgggcagacctacagcggcgagtacgtattcggcgcgttcagcaacacggtgtcgatcggcggcatgctgcactacgacagtgcgctcgtcgatatgaacgacgggaagctcgagatgctcctgatccgcaagccggcgagcctcagcgaggtgcaccggctgatccacgcgctcggcagcagcagtttcgacgacccgctgtttgatttcgccgcatcctccgtgttccgcctgcaaagcgagagcggcttcgactggtctgtggacggcgagcgcgctgccggcggccccaaagtggagattgcctgcgtgaaaagcgcggtgtgcatcacagttccggcgagaaaagattgattttttacagaaaacgtgtataatagcaggagactgtgcgaatgcgggaataccctgtttgtacagggaaaggagggatgggccttgtccgccacatccgcaaaaaagaaggccggcatgggggagacggtcgcgacgatctttaaggatcacgtcgtctaccgcaagcagatcatcaagctcgccggctccgacctgcgccgcacctaccgcgcctcggcgctcggctgggcgtgggcggtcatcaagccgctcgtgacgatcttcgtctattggttcgccttttccatcggcctgcgcaagggcggcgacattgccggctacccgtttgtgctctggctgatctgcggcatcgtgccgtggttttatatgagcgagatgctgacgctcggcacggagtgcatcttgcgcaaccggtatcttgtcacaaagatgaagtacccggtttcgacaatcccgacttttacgagcatttcaaaattttccgtgcatctgatccttctgatcctgacgattttgatctttatcctgaccggccatatgccgacggtttacatggtgcagcttccgttttacatgctgtgcaatttcctgtttttcacaggctgggcgctttttgcggcgccgattgcggcgatcagcacggatttctcgaatctcgtcaagtcgttcgtcacggcggtattctggctttccggcatcctgtgggaagtcgattcgatgcacaacaagcttgcccaccagcttttgatgctgaacccggtcacattcatctgcaacggctaccgcaactgtttcgtctaccagacatggtttttcgagcagccgaagcgcctgctgtattttgcggttgccctcgtgctgatctatgcgctcggcttctggagctaccgccgcacgcgcagcgaaatggccgacgtgctttgaggggatcgatatggacgatattgcaatccggtttacggacgtatctaaaatttacaagctgtattcgagcagccggcgccggctcctcggccttttcctgaagcgcgtgccgcataaggagaagaaggccgtcgtcgatatgagcctgacgattcaccgcggtgaatccgtggcggtgctcgggcgcaacggcgcgggcaaatcgacgcttttgaagatgatcacgggcgtcacgttcccgaccgagggggagatcgaggtgaacggcatcgtcagcgcgcttctcgagctgacgagcggcttcgatcaggaattcaccgggcgcgaaaacatctacctcaagggccgcatcctcggcctgcgggacgaggagatcgcgaagctcgagccgggcatcgtcgagtttgcagagctggaagagtacatcgaccagcccgtgcgcacgtactcgagcggcatgaaggcgcgtcttggcttttcggtgtgcgtgaacatccaccccgagatcctgattgtcgacgaggcgctttcggtcggcgaccgcgcgttccgagacaagtgcatcaagaagatcaaggacatcatgcagggcgacatcacgatgctgtttgtcacgcacgcggttgaaacggcgcgggcgttctgcaagcgcggcgtcgtcatgaaggccggccgggtcgtctttgacggggacatcgacgcggcgatcgagtattacaacacgaagtattgacggcggacaggttggaggaagcaggaatttatgaaaaagctggttgcttttctgtgtgcagtcgtcatgctgcttttgttcgcggcttgtgccgccggagagggcgggaaggagattcccggggcgctgccggagatcctcgaccgcctgtacgacacggctgaggtcgacgacgcgacgcgcgattttctgaaaacaggtctcgtcacgatggatatgccgcccgaagtgctgcgggataccctcggccttgcggatatgccggatgcggaggccgtcgcaagcgagccgaccgcagaggacgattcgttttttgtctgcctgatgcgtatgccgggcggcacggatgtcgcggcgttcaagcagacgctgcgcgaggcggcgctcccgcaggcgaaaagcggcgaatcggtgtgcgttgagagcgcgggcgatctggtcctcctcgtgatggcgcaggaggcggaaaaatacggcgcggcgtttcacgcgctcgccgaataagaagcatgcctcgtttggcggggcttttttcgttcggccttcgggggagggccaaattgcgcgggcaaatgcggaaagcggcgcctgtccgcccgaaaattcagggaaagggccccgcggcgcggggatacggtgcttttatggaggatatattttcgagatcggcgcttctgctcggcgaggcggcgctggaaacgcttcggcggtcgcgcgtcgcggtgttcggcgtcggcggcgtcggcggctacgcggtggaggcgctggcgcgcagcggcgtcggcgagctgcacctgatcgacaacgatacggtttcgctgacgaacctgaaccggcagatcatcgcgctgcacagcacgatcggccgcccgaaggcggaggtgatgcgcgagcgcgtgctcgacatcaacccggactgccgtgtgttcgcttacgagacgtttttcacgccggagacggccggcgatttcgattttacccggttcgactatgtcgtcgatgcgatcgacacggtatcgggcaagattcagatcacggtttcggcccgcgcggccggtgtgcctgtcatctgcgcgatgggcgcgggcaataagctcgatcccacccgcttcgaggtggcggagctcgagaaaacgagtgtctgcccgctggcgcgcgtgatgcggcgcgagctgaaaaaacgcggcatcacaggcgtgaaggtagtctactcgcgggaggagccgacagcgccgcacggcgggatagagacggacgcggttttcggggcgcgccgccagacgccgggcagtctgccctttgtccccgccgccgccggcctcatcctcgcctccgccgtcgtttacgatttgatcggcatgcggggataaacgcccggcgctttgcggaggccgaaaaaataagctgcaaaagaaaggcagcatgtaccggaaggtgttttccaaggtacatgctgtctttttgtatgcagaaaaccttctgcgtatctcagcctaaaagctggtcctgcatgcggcggagctgaaggagcatggactccggcaggcgcaccatgtcgtaggtgacagcggtgtcgcagggaatgtcggtgagggcaacggcgccctttgcgaggccgacaggcagcagattctgctgtttggcgaccgcataccggtcgatactcgcgcgatagcagtattcgccgatgccgtccagcacctcgcctgcgcggatatcccgctttgtgacggtgatgcactcgcttgtcatgtgatccatcgggtggccggtggattctccgtaaagcacggcctgcgcggcggtgatcggcgtctcgatggaacacaggtgatacgggcgcagaagcaggtaattgggcccctcgcccatatcgcgctggacgaggccgtcgatgatgcgctggttctgcgtggtcacgatgacgaatacaccggggttgatatcgccgatgccgtaatccaccacgccgttctggctgagaatgccgccctgcgattgaaggctgaatacgcgtgcgaggtcggcacggttgcagcgcggaccgtgcataccgcggcagtccggcacgagcccggtcgcgttggagaccgcacacatctcgatcatggttttggagccgtcgacaaattcgatgagcatccgagtggccatctcgcgcttggccgctttctcctgccattcgggcaggccggggtgtgcgtagatatcgagcgggttattttttcctttgccggcggcgacgacggtgaagccgagcgccttggcaaaccggtaaacttcgatgatggagcccggctcgtcccctgcggttaaggaatagacgatgccggcctgttcgcagagacggcggagaatagggccgacggtcacgtcgcactcgacgttcatcatcacgatatgctttttgtgcaggatgcagtccatcgtgatgcgggcgcccatttcgggagatcctgtggcgtcgatgacgacctgaacggtcgatagggatacggcgagcctgtagtcggtggccgccgctttctttccggcagcggcagcggcttcggtttcggcctgcgttgtgcagacggcgatctcctgctgtgtgtctgcttgccggtagccgtccaaacaggtgtcgatggagaggtcgacgacgatatcaagcgtcattccccgcatgccggcaatctgagcgatgatatccttgcccatctggccggcgccgatcagcgctgcatggatgggagttccctgctggtgcagggcttcgagtttcctgtcgatttcatacatgattgaaaccttctttcggatttataaatttaaaaatgaagaatatttgggagcaacagaagagaatctctgttttctattatgcaacacttcttttcgtttttcaagataaattttgaaaaatgaaaaaatatttgaaaaacctattgcatttgatggacaactgtgataatatcggtaacaacagaagagaaaaactgatcgttttgtgcaggacccaaattttgatttgaaaactcatgccttgaaagtgaaaataaaacaaaatttggaaaaagcacaaaaaacacagtaaatttcagaaatggaggaaagaatatgaaaacaaaaagatggctggcctgcatgctatccgcagcaatggtgatttctatggctgcgtgcagcagtgggggaggcgaaaacacggagagccagaacacatcgacggtctctgccggatcggcggtagaaggggaggacggtccctttgccccgtatgcggagaccgtcacgatggacttcggcgtagacatggatgtgaacagcggagaggcaactaagctggcagaggctggcgagccctacgacgacaatcggtggatccagctctttaaggaaaaactcaacgttcaaacgaattatgagctggtggcgaccggcgagcagtacaaccagcagatcaagcttttgatgtcttcgaatgagctgccggattacttcaagatcaatgattggtccgattttcagcagatggcggacgccggccttttgacggatatgaccgacatctacgagcagtatgcttcgccgcttttgaaatccatcatggagacggagggcgagcaggtgtacctgccggtgacctacaacggaagaatgtacggcctgccgcgcacaatgccctcgacaaacggctacaatcacctgtggattcggcaggactggctcgataatctcgggctggaacgcccgaaaacgatggaggacgtgctggaaattgcccgggcctttaaggaaaaggatccggacggaaacggcgagagcgacacgctgggcatgcggctcgaccagacctatatgaaccagaagggcctgttctggggcttcggcggctatccggatttctgggtgaccaaggcggacggcagcgtcgattacggcacggtgcagcccgagatcaagaagggtctcagctttatcaagactatgttggatgagggcctcgtgaatccggaatttatcacgacggaccgcgaaacctcgcaggaggatgtcgtcagcggcaaggtcggcatgtattacggcgcgcactgggagagccctcgggcctctgtagacgcggatccggatgcacgctgggcggcggttccgctgccgacggaggacggcggcgcgattacgatcccgctgacgaccggtgtggagggcggctatgtggccaccgccaatgcggaacatcccgaggcgctcgtaaaaatgatgaatgtatatgtggaagcgctgttcggtgaggagggcgattttaaccgctacttcacggtagagggcatcggtgccgtctggaactattcgccggtaagcctcttggacccggagatcgatgtggacggctaccgagaatggaaggcggcggccgatgcgaatgatttttcgaatatcggcggctccggcaagggcttttacgaatttaacgagcagggcctgatcgaatacggcatgatgtttggcccgcaggacagtgcgttcgccttcgtggaccagacgtatccggacagcgtcatgtggaacgcgtacttcggtgcatcgacgcccacacaggtcgagcgcggcagctcgatgagcgaatacttgaacacgacgctggcctcgctcgttaccgggcagcttgaaatggacagcggctttgaccaaatggtgtctgaatggcgttcgatgggcggcgaccttgtgatcgaagagatcacagagcttctgaacgaatccgaatcaggggaataacccggcgggcagatgccccgaaattgaccgaagggcggtgtgccgttttccactgcggccgccgcccttttccatttcttgtgataggaggacagaagcgttatgaaagcgacgcgagtgaaacacttcaagcgtgtcaagcagtggcccctccatttgatgctgctccccggggtaatcctgctgtttgttttttcctatgtgccgatggcgggcattgtcattgcctttcaaaagtacaaccccgcaaagggttttatcttcagccagacctttaacgggctggacaatttcaggtacatattctccatgccgaacatcgggcaggtaatctggaacacggtgttcatggcggtttcgaagattatcctcggcatgctcgtgccgattctcgtggcgctgctgctcaatgaactgcgcagccgggcctttaagcgcacgatacagaccgtcatctacttcccgtacttcttgtcgtggatcattctggccggcgtgtttaccgacatcctctcgccgaccgacggcgtggttaatcagattttaaagacggtcggaatggagccaatctactttctcggcgataagcagtggtttccggtcacgatgatcatcacggatgtctggaagggattcggcttcggcacgatcgtttatttagcggcaatcaccggcatagaccccacactctacgaggcggcggagatcgacggcgcctcccgctggcggcagacttggcacatcacgctgccgggcatgcgcatgatcatcgttctgatgctcacgcttagcctcggcaatgtgctcaacgccggcttcgaccagatctttaacctctataacgatctggtgatggaaaccggcgatattctggacacgcttgtctaccggctgggcctgcagcagacgcagtacgggccatccacggcggtgggcctgctgaaatccgtggtatcatgcattttaatttcggtttcctattatgtatcgtacaaagtgttcgactatcagatgttctgaggaggggctgcaaaatgaagattgaatcgaagggcgtcaaggtcttccgcgttttcaatgttttgattttgattgcgcttggcctgatctgcctgctgccgtttctcaatgtaatcgccctttctttcagcgataaaatagcggcggccagcggacaggtcaccttttggccggtgaactttacgaccgacgcttaccggtacgttttggatcagggcgcgttctggcggtcgtttctgatctcgctcgagcgcgtggcgctgggcggcggcctcggtattttcctgacggtgctttcggcttacccgctgtcgaaatcgagcgccgtgtttaaaatgcgtaccgtctatgtgtggtactttttcatcacaatgctgttcagcggcggtttgattccgggctatgtggtcatcacggggctggggctgaagaacaccatttgggcgctggtgctgcctggcgcggtgagcgcgtacaatatcctgctgatgctcaatttttaccggcagttgcccagcgagctggaggaagcggcgttcatcgacggcgcggggcatttcagaacgtggttccacatctatctgccgtgctcaattccttcgatcgccaccatcgcgcttttcacgatcgtgggccagtggaacgcatggttcgacggcctgatctacatgacaaagacggagctttatcccttgcagagctacctgcaaacaatcgtgacccggctcgattttcagaatatgacggcggaggagctcaagcgcctgtctgcgctgaaccagcgctcgctgatctcggcgcagatggtgatcgccatggtcccaattttgatcctgtatccttttttgcagaaatactttgtgaccggcatggtgctcggcagcgtgaagggctgactattttgagaggagttttcctgtatgcagcgattaaaggtaagtgaaaataagcgttttttatgccttgaggacggctctccctttttctggctcggcgatacagcatgggagctgttccaccggctgagccttgaggaagcagagcggtactttcaagtgcgggcgaagcagggcttcacggtcacgcagatcgtggcgcttgcggaatttgacggtttgaccgagccaaattattacgggcggtttccgctcttgaaaaatgaagggggcgcctatgacccttgcctgtgggatacggcgggaccgaattcctactgggatcatgtggatgcggttctcgatcttgcggaaaaatacaatatgtatgtggcctttgtggcaacgtggggcgataaatatttcaaggcgcacggcgtggggccggagatcttcactccggagaacgcgaggatatacgggcgcatgctgggtgagcgctacggcgggcgcgacaacctgctgtgggtgctcggcggcgatcgcggacttgcggcgtatgcgcattttaaaatcaacgaggcgctggcgctcgggctccgtgaaggggagaaaaagcggcatctggtcacctgccatccgggcggagcacagtcgagctcgcggtatttcccgacagaggattggctggatttcaacatgatccagtccggtcacaactgccggaacctcaagaactacgaatacgtgcagcacgactatgcgctcgagccgataaagccgacgctggacgccgagccgcgttatgaggatcacccggtggatttcaatcccgaaaacggctacttcgatgcgccggatattcggcaggccgcttactggggcgttttttccggcggtctcggcatcacgtacggcctcacagcgtgtggcggatgaatcgggcgttttccgcttactacccgctgacatgggaggcggggctggagagaccgggcgcgtgccagatgcggcatctcaaggcgctgatcctgcgctatccgtttttcgagcgcgttcccgcgcaggaactgcttgcggaaaattacggcggcgccagctacatcgcagcggcgcgcggcgcacggtacgcgctgttttacgcgccgaacggcgtggatgtgccggtgcggctcggtatgcttccgggcggcacggtgcgggccgcatggtacagccccgtaacgggagaaacacaggaaatcggtgtattggacaatgcgggcgtccgtgttttttcgcccgaaaagcgtggccgggatcaggatatcgtcctgtgtctcgagagctgctgacaggaggcgagaactgaaatggatcataaaattgttttgggcatagcgccaacccggcggggcggcgtgtttgtgaaccccgatgcgctgcggcagaaagcgctcctctacacggtgttggaggagctggatctgccgaacgtcgagctggtcgacttggagggaatcaatgaagaggggcttctgcgcggcaaggaggatgtgcccggggtaatcgaacgctttaaagcgcgcggtgtcaacgcgctgtttttcccgcactgcaatttcggctcggagcacagcgtcgcaaaggtggcggctgcactgggggtgccgcttctgctgtgggggccgcgcgatgaggcgccggaagcggacggctcccgcctgcgcgacacgcagtgcggcctgtttgcgacgggcaaggtgctgcgcagaatgaatgtgccgttcacctatttgccgaactgccgcacgagggatcccctttttcaaaagggactggaaacctttctgtccgcggccaatgtcgtaaaggaatttcgccgggcgagaattctgcaaatcagcgtgcggccggacgatttctggacgatgatgtgcaacgagggcgaactgctcgaaaaatttgggatccagatctttccggtatccgtcagcgatcttgtccagcgcgtggaggcgctttcaaaggaaaacccggcctccgtacaggaaaccgtgcggtacatctatgcgcacgccgaggtgaagatcgatgcggcggcggtgcacaggctggcctgcctgaaggtcgcgatgcaaaaaatcgcggaggaaaacgactgcacggccgtagcgatccagtgctggtattccctgcaaaaaacgctcggcgtcatgccgtgtctcgcaaatgcactgctcacggaggaggggctcccggttgcctgcgaaacggatatccacggcgcgatctcgtccattctgctgcaggcggcaggcagaggcgcttccccgagtttctttgtggattggtctgtgcgtcacccaacggcggaaaacggcgagctcttacagcactgcgggccgtggccgctctccctcgcaaaggagaggccggtcgtcacgcgtccgttcgcgttttccgagaactgcccgggcgccgttgtggcagagtgcaggggcggtgagatcacgctgctgcgctttgacggcgaccacggggaatacggcctgttgctgggcacagcccgcggcatagaaggcccgaaaaaccacgggacatacctgtgggtggaggtgccgaactggccgaaggtggagagcatgatcgtcaaggggccatatgtgcaccatgcgacgggcctgcacggcaatgtgcttccggtactgtatgcggcagcggactacctgccgcagctccgcttggatttcttcgatgaaaaacagcggcaggagacagaaaacagcttttttcagtgattttggagtgcggcaatgaagcttttgggaattgatgtgggcactacgggcgtaaaggctgcgatcttttcgcaggagggcgaaatgcttggctgcggcatggagacctatgcggtggatttcgacggaaaggggcatgcggagcaggatggcgagctggtctggcggaaggctgtgcgcgcggtgcaggccgcggcggcgcaggccggcggtgatgtcgacgctgtgagcgtctccgcgcagggcgacgcgcttttattggtcggccggagcgggcagcttctggcgccggtgcagctcggaatggattaccgtgccgccgcgcagacggaaaggctgtgcgcgcactggggagaaagcgccctgtaccggcgaaccggcatgccgccgcaccctttgaatttctttttgaagctgctttggacggcggaaaactgcccggcgcttctggaaaaaacatggaaggcgatgacctatgcggatttcttcctgtatcggctctgcggcgccgcgaaaatcgacgcgaccatggcagggcggacgatggcagtgcgcctgagcaccggggattgggatgacgtgtttttatccgaagccggcgtcagtcgggaaaagctgtctgaaatctgcccgccgggaacggcagtcggcgtggttcgggcggataccgcgaggatgctcggcatttcggaaaaagcgctggtggcggcaggcgggcacgatcaggtctgtgccgcgctgggcgccggcgtcagccgcccgaggatcgggctcgattcgcatggaactgcggaggttctttccacagcgctttcggcgccctgcctgacggaagcgctgcggatggccgggtgcccgtgctatccgcacggcgtcgaagggcggtactttacctttggcctgaaccatacgggcggcgtcggcctgcagcggtacagggcgctgttcgggtatgcggattacgaagcgatgttggtgtctctgccgccggagccgacggcgctgctcacggttccgtcgtttttggcggatgcccggggcgcctgcgcggggacggtcaccgggctgcgtctttcgacggcccgggaagagatctgcaaatcttttttggaggggcttgcctttgaaatgcgccggtttctggagctgttcagcgcggctggcgcgccggttcacgagctgcgctgtgtgggcggcggggcgcgctcggcggtcggccttcagctcaaggccgacgtgtacggcaggccggtggcgacgctgcatgtccgggaggctgcgtgcctcggcgcggcaatactggccggaacggccgcaggtgcatttgcttctgttgaggaggggatcgcccggatggttcgtacagcgcgtgtttatgcgccggatccggtgcgtgcggccttgtatcgggaaaaatacggggcttacgtccggctgctcgagggcttgagacaggatcgttggacggttcatgtgtgaaaaaaggaggatcgtattgaaagatcaggaaattttagaggaaatccggcggacgctggagatggaagcggccgctgtgcaggggattctgcgatggattcaggatgaggaatgggtgcggctcgtgcgccttttggccggtcataccggccggatcgcggtgagcgggtgcggcacctcagcgatggccgcgagaaaaatcgcacattcgctgtgctgcatcgagcggcccgcgtttttcctcacgccgtccgacgccgtgcacggcgggctgggcgctgtgcaggcgggcgacatctgcattttggtcagcaaaggcggcaatacggcggaacttctgcacatgctgcccgcgctgaaaaagaagggcgccgccgtggttgctgttacggaaaaccgtgagtccgcgctcgcgcaggccgcagcactggtacttaatgtccgcatcgagcgcgagccctgccggttcaatatgctggcgacggccagcacggtttcggtgatcgcagcgtttgacgcgatctgcatcgcgctgatgcagctgacgggctacacgcgcgcgcagttttcggtgattcaccccgggggcgccgtgggcgagcggctcgcgtcggaaaaggaggtgctgtaaaatggaagcagggcagatgaaagcggctgtttttaagggccccggaaaaatggagcttgaaagccggcccataccggtctgcccagatccgggcgtgctgatcagggtacggttctgcggtatctgcggcagcgacgtgcggaattttgcgaacgggctgaaaggtggcgttacaaatcaaatcatgggccatgaggctgtgggtgagattgcggaggttcggggcagcatcccgttttccgtgggcgatcgggtagcgctggcgccggacgtacactgcgggaaatgctggtactgcaagcgcggcctcgtgaacctgtgtgagaaccacaggatgctcggtacgcatttccccggcggttttgcgcagtatatggcgctgtcgcaggagcagatcgagcacggttttctggagaaaattccggatgcgctctcctatgaggaagcggcgctttcggaaacggccgcggcggtggtggcgtgccagaaccgtctaggaatcacggtcggcgatacggtagtggttattggggacggcccagtgggctgcctgcacgtacagcttgcaaaatcgagaggcgcggcgcaggtcattcttgtgggcatggaccgcctcgcgcttgcagagcgctttcatcccgaccttctgctctgcaaccgtgaccccgaagctgtggtggaagcggtgctgcgggcaacgggaggccgcggcgccgatgcggtgatcgccgctgtacctgccgcctctgttcagcagcaggggcttcgaatgctccgccggcgggggacgctggtcatctacggcggcgtgccgcagcaggcggcgctttccgagatggattcgaaccagatccattacaatgaacttacggtgaccggcgcgttttcctatccggcggacgggctgcaaaacgcgcttgccgcgctgtgcagcggaaagattgaggctggccggtttatttcggcggtcgttccgctcgatgcgattctcgagggcttcgatatggcgcgccgcggcagttcgctgaaggtgctggtggatctttggagatgaagccttccgttttggtggattttacagtagaaattgaggcttaaaaagtatataatagacgaaataagagaaatttggaaaggcagggaaaccctgcatcaccacaatttcaagcgggaggaagtgagcgcctatgaccgtcgatttatcagatccgcagatccagaaaattacctatcagtgcctgctgaggattcagtcggtttatgattctctcaaatctgccgagcgcagggcggtggattttctgatgacagatccggaattccttgcaaaaaattcgattgtggaggtggcggtcagagccgggtgcagcgaggcgacgcttgtccgcctgagctaccgcatgggcttcgggagttattccgatttaaaagccgctgttttgaaagaggatgcaacggaaaatctggaatgtctttacgaggggattgaggagcacgacgatgcgcccacggtgatgggcaaggtgatgcgctcctcaatacaggcgattgaggataccgtcagcctgatcgacccgcaggcctatcaaagggctgtggacgcgattctggctgcgggcaggctgcagtttgcggggatcggcgacgctggcgttgtggcgatgtccggctactacaagtttttccggctcggcatgaacgtgtacttttcacaggattatgacgtggcgctgatgatgacctcgcagctcggaaagggcgacgtgctggtggcggtcagccattccggcaagacaaaaacgacgctcaacacgctgcactgcgcaaaagagcgcggtgcaacggtgatcgctgtgacgaacagcccgtattcaccgatcggcaagcaggcggatattctgctttccacggcggtattcggggaaaatatgatcggcgagagtatggcgaagcgcatcccctcgttctgccttttagagagtctgtacatcaatgcgctggcgcacatcgacggcgggcagcggcagcagcttgagcagcgcgaccaagccctgctgatcaataaatgagggaggacctcgcggagaaatccggcgcgcagccggcggaccatcgcggggtctctttcgtttttttggggactcgcggcgggagcggatcgctttctctgcggcgcaatcgatcgataaaagtcttttctaaataaaaaggaggcggctgagatgcaatcgtaccggctgtatgcgggggcttatacggatgggaagccgggggacggcgtatattttctggactttgatgccgacggcctgcgggtcgcgcaggtttgcggcggcgtggtgaatacttcttacgtgctgccggagagcggccgtctctacgctgtggaggaggtcgatagggcggcctccgtgctcgagtttgagccggccgccggcacgtcgttccggcgctgggcggtgcccggctccggcctgtgccacatcgcttcaaacgggccgtttctgtatgcttccggctatgcgggcggcacgctgaccggcctgagaaaatcggatggggccgtgtgcagctttctgcggcatgaggggaacagcgtgcacccgctgcggcagacgcaggcgcacgtgcattcggcgctgccaacgccggacggacgccgcctccttgtggcggatctcggcatggaccgcctgtttcagtacgagattggcccgggcggcgcgctggaaccgcgcggagcgcagccttggacagcggtgccgcccgggcaggggccgcggcattttgcgtttcaccccaatggggcgtggctgtatttggcggcagagctcaaacggtcgctgttcgtttaccgcaatgcgcccgcagggctggcgcttactgcggcgtacacgctgcggagggatgacgatcccgcggattcgcttgcggcggacgttcatgtgacgccggacggcaattttgtctacgcctccgtgcgcggggcggattgcctttactgcttccgggtcctcgagcgcggcagccgtttggaagaagccggtcggttttcgagcggcgggtgttggccgcgcagcttcgacatcagcccggacggcttgtatatcgcggtcgccaatcaaatgccgggcagtgtgacggtttttccgagagacacgcgcaccggcgcgctggaagcgccggctgccgtgctggcgcttccgcaggcggcctgtgtgaaatgggaacgctgagccgccggcacttccgaatcaggcgtttttcgccggcatgaaaaagaaccttcggtattgccgaaggttctttttttgtatgggtggcagactgccggaaatcacggcggcattggatatcggcgtgacagccgaacatcctctgcatcgacggcaggcttgcggcagaatgcccggcaaaaaggctgccgggaaaacgcgctgcgaaaagtctttgtttttcggtcgaaactgcaccggatttggggcgtcaggaaggcttgcatgtaccaaggcagagtgaaaaaaggaggtataaggatgaaaaactgagatttatatttattgaaaatcaaaatcagtaaatattaacgtatcaaaaagtacactttttgaaagttctttcttgaaaccaataatacacctaaaattctaaaaaatcaatagttttatagtataaaattgaatatttttgataacttgccgaaatgtgcagaaatgcaggcaaaaaaaacgcataaaatgcagatctcaaaaagtgtactttctgataatgtttcgatttcgtgacatttatacagggggaggaggtgctgaaccatcagcattatgcgggaaaagcggcttcaggaaataaagcgaaacgtgaaaagtctgttttctaaaaataccggcttcattccatgcggatcggctttcgcccgtacagtttggggaaacatattgaaacaaacaagcaaaggagaacaatcatgaagaaaagaacagtagcgatgctgttgtctgcggtcatgctgctcaccggtgtgatgagcggctgcggcggcaattcgacaggtacgtcgaccggcggatcgggcgacagcagcacatccggcggaagctcgtcttccacggatacgggtaagctggccgcgacaggcattaccacggcggtcggaacgaaccgcgatgaaacgcttatcgtcgagtgccagagcccgaccgacaccccgggccagttcaatacgtatatgaccggcacggcgaccggcttcggcatccatcagctgatgagcgcccacctttgggaaatggacacggttgccggcgagcagttcccggaaattgccgcggatatgggcacgccgaacgaggacttcacggagtggaccgttaaactccgcgagggtatcaaatggtcggacggcgaggatctgaacgcggatgacgtcgttttcacgttcaacatgatcaaggaaaacgatgcgatcggcgcttccgccgcgaccaatctgtatgtggaagctgtggaaaaggtggatgactacaccgttaagttcaagatgacggagtctttcccccgcctgacgcagcgctacggcatcacggtttggggctgcgattatcgaattgttcccgagcacatctactcccagcaggcggacgtgaccacgtttaaggacgagcagcccgtcgtggcaggcccttatgtcgtagaggattacgaccccaacggcgactgggttctctataagctccgcgacgattggttccagagcacgctcggcgtggtcggcagcgattactacggctacaccgaggaccagaagcccgcgacctacgtatggttccgctatctcggcgactccacgacgagacagatgcagatggtcaacaatgaagtggacgtactctgcgaagtgaccatggaagagtttgagtctatgaacagctcgaacgaaaacatcgagtgctggtatcccgaattcccctatgcgacctcggacgatccgggcgcgaaatccatcgtattctcgcacggtcagggcgcgccctatgacaatgcggacttccgctggggcctgacgctcgcgctgaatatcgacgagctcacgcagaacatcttctccggcgccggccgtgtagcgccgattccgctgatgaacaacacgagctacctgcagcagacctatacgatcccgatgcaggagtggctggaaaactttgagctggatctgggcgacggcaccacctttaagccctatgatacaggctatgcagcccgcatcgcagaatctctcggcattgagggcacggaagaagagctgatcgaaatgtttggcgccggctggtggaagcatgacgctgaagcggccgagaagctgctcatcaaggccggcctcgaaaagagatcggacggctggtattttgacggagagcccttcactatggagctgagctatctggccgatgcggaggcgcaggcttcccgcacgattcaggcagcctacaaccagtggaccgctttcggcctgaactgcacgatcacctcgaagagctccgcgacatgggatgtggacggcggacagggcaactatgaagtggccggctactggccctccggcggtatcatgaaggacttctactccgcgatcagcggctttgacaaccagctgattaagccggtcggcgaaaccggctccggtcagggcctgcgctgggacaaccagacggcttccgacattctgcacaagctggcgaataccgacccgaacagcgatgaggcctatgacctgcatgttcagttcctgcaggaggctgtgaaggatatgccctttatcaacgtgacgaacggcacgaagtttgtgccgaccaacagcacctactgggagggctacccaaactccgagaacaactacaacggtccttggtggtggtggagctgcttcaagtacatgctgcccaacattacgcctgtgcagggttgagaaacgcaatttagagcagaccgcaacgctgtgacatgatttgaatgcagaggaggagaggcgtgcgtccggaagcatcaggaccgcgcctctttttccgcatttgttttgccgctttggctgcggcggtttgctgattccctttaaaggagtggaggctgtgaaattcagaaccttttttctgcatcggattcttgcgtgggcactgactattctgatcggcgttacctttattttctttataccgcgcatgttcccttcagatcctgttgaaaacatgattgctcagatgcagtctcggtccggcaatatggaccctgccgaaatggatgcgctgcgcgagcagctccggattcagttcggccttgacggctctttgctggagcagtatttttactttttgacccatggattgctgcaatttgactttggcccgtctctgatgagctatccggagccggtgacgaatatcataggccgcaatctgccgtatacgcttgggctttctttgatttccacgcttttggcttgggcgatcggcaactttatcggcctgctggcgggcttccgcaagaataagcgttcctccaagattctggagggcatcgccatctgcatttacccgattccgtatttcctgattgcgctggtgctgcagattgtgttcgcctttgttctagggtggttccccatccagacgacgctgctcacgagaggcacgtttatgcagtggctcggctcgctgctgcacgcttccatcctcccggcgctctccatgctgctgcttggaaccggctggtggatcatctccatgaaatcgctggccagcacgacctcggaggaggattacgtgatgtttgccagataccgcggcctttcagagggcacgatcggcaagaactatgtattccgcaattccatcttgacgcagatcacggcgcttgccatgagcctcggcggtgtgttcggcggctccatcatgacggaaattatttttgggtatccgggcgtgggcacgctgattcagaacgcgatcctgcagtcggactacaacatgattctgggatgtattacgatatccattgtggcgatttccaccgctacgctgattgtcgatctggtctatccctttatcgatccgcgcattcgttacggctgagggaagggggaaggcaaatgaaaaaattttggaaagtcgccaatttccggttgaaggccggcctgattatcacggctttcttcctgattatcggctttgtcgtctattattttccgcataccgacccgttcaccttcaatacataccccaataagctcggggcttctgcggagcactggctcggcacgacgagcatggggcaggacgtcgtatggcttctgatcgaatccatccataattcgctggcgatcggcctgatcgtcgcgttcctcggcaccgtggtcggcgttctggtcggtctgctggccggctttgccggcggcgctctggaccgcgtcctgatggtgatcacggatacctttgtggtcatcccgtctctgccgattctgattatgatgacatctttgatgaaaggcagctcgacgacgatcgtcatggcgctggtgcttgccatgtttgcatgggcttggcccagccggcagatccggtccatggcgctgagcatcaaggagcgggactttatccacacggcccgcttttccggagaaagcacgctgcagattgtcgtcacggaaattcttccctatgcgcttacttggtctctctcaaactttatgaatgccaccctgtctgcgatcgggtcggaatccagccttgcggtgctggggctttcccccggcaatctggtttctctgggcaacatgatccagtgggccagaagctacaatgcgattttcaataagcagtatctctggatcggcgcgcccatcgtggccacagtgattctgtttatcggcctgttcttgctgattacgggctataacgattatttatctatgaagagaggcaggtaacggatatgctgaaagtcgatcatctgtccacttcttataagacgctggatggggacgtccacgtcatcaacgacttaaattttgagattcgggaaaatgagattttcggtattgccggtgaatccggctgcggcaaaacgacgctgctgaaaaccctgtacgacatcgtcgagtatccgctcgtcatcgatcagggaaaagtgacgctgagcggagagaaaaacggaaagcccttttcctttgaatccggccagattcggaaaacctggtggaacaatatatcctacgtgccgcaggcggcgcagagcgtgctgaaccccatcgtgcggctcaaaaagcagtttctggattccataccgaagcaggacaagcgaaacgagacggagaagcagacgctcgcccgcgtcgcgaaatatctggaggaactcagcctttctccggatgtgctggaggcatacccgttccagctttccggcggcatgcgccagcgcgtgatcatcgcgcttgcaacctttatgtcgcccagcgtggttctggccgacgagccgaccacggcgctcgacgttgtcgtgcagcgcggcatcctgatgatgctgatgcgcctgcagcgccagctgaaaaatacgatggtgatcgtcagccatgacatgggcgtgcactatcaggtgacggaccgcatggcgatcatgtattccggcagcatcatcgagctgggcaatacggaggaaattttcagcgatccggttcacccgtataccacgatgctcgtcgggtccctgccgcgtgtaggcgataagagtcagaaggtgggtattccgggccggccgcctgcattgacaaatccgccgccggggtgccgctttgcaccgcgctgcccgtatgcgacggacctgtgccgcaaggaaatccccgcgttccgcgaggtaaagccgggccggttcgctgcctgtcatctgctgaataagggggtggaataaatggctgaaaaattgttggaaatcaaaggggtcagcaaaattttccgtatcggcggtatgattcgcggcaaaaagttggtcgcagtcgatgatgtttcgatctccatcgacaatgacaagccggttattctctccgtcgtcggcgaatccggctgcggaaaatccaccctgtgcaagatggtgctgcgcctgcaccgcccggatatgggtgatatcattctggacgggagatcttatctggataaaaaggggtatgatccgctgcagttcaagctggatgtgcagcccattttccagaacccttacgaatccttttccgcccgtaagccggtagattcctatctgttcaatacggctctgcggctcggcatcgcgaaaaaccgggaggaagcgacgaagctggtggacgaggcgctgaaaagcgtcggcctttctctggcagttgtaaagggaaagtatcccacgcagttttccggcggcgaactgcagcgcgtttccatcgcccgcgcgctgattacccgcccgaagctgatcattgcggacgagcccgtcgcagcgattgacgcatccatgaagatgaatatcgtcaatctgttcaaggagctcaaggataagtatggcatttccttcatctatataacgcatgacctctctacggcgtactatgtttcggattacattgcgacgctgtaccgcggctgcctgatcgagtacggtccggccaaggagatcatggataacccggcacatccgtatacggagcttctgatgaatgcagtgccgaaggtgggggataagtggaaagaagatctggtccttccggatatggaggataaagagtattccatttcctactgtaaatttgcgccccggtgtccttacgccaccgatgagtgcagaaatgcgcggcccggagaaacctatctcaacgagacgcgcaaggtcatgtgcttccatcccttgaagggctgaatctgctgaaaaacagatttcccatttggaaataaccggttctgggttaggttaatctggaaacttctgaacggcgtgtgccatgctgcggcaggtatacgccgtttttgttttcctgctttcggctgttctgagagcgtacaggtttcgcgccccccctgcggcgaaacggcgtgctgtgcgggccctgcgctcggaaacggagcggcgccgcaggcaaaaagcagatcggaatcagattgcaatacgtcgaacaagcctgaatgtggtataaagaacgtgcggagccgtaatgggtgcggttccgccgcgcttattttcagaggggtgatgtttgatgatgtatggctatatccgtgtttccagcacagaccagaacgaggaccggcaggtgacggcactgcggggaaagggcgttccggacgggaatatctacatggacaagcaatcgggaaaggattttgaccgtccgaggtacaaaaggctggcgggaaagctcaagccgggcgatctgctgtatgtgcacagcatcgaccggctgggaaggaattacgaggagattcaaaaccagtggcgcattttaacgaaggagatcggcgcggacatctgcgtgctggatatgcccctgctggacacaagaaacggcagggatctgatgggcaccttcatcgccgacctggtgctgcagattctgtcctttgtggcgcagaatgagcgggaggccatccgaaaacggcaggccgaggggatcgcggcggccaaagccaagggcgtccgtttcggaaggcccgagtgcccgctgccggatacgtttgaaaatatcgtgcggcagtgggagggaaagcagctcccgcttcagaaagcactcgaacagagcggaatgagccaagccaccttttaccgccgcctgcgggaatacaggcgcaggcggttggattagggggggggcggtagggggctactggggtggcttttgaaatgaagtgcatatgcctttgagtctcaaatcgatccggtttcgggatttgccagacctattctaaaagctgtttttatagttccgataatgggataaggagaatgtagaaaagcgggacccatacctgaataatcaggcggaaaccccactttgaccaatttaactgctgtttggatatctatggtgaaaccgttttccgaattttgcccccaaagcccaaacccgcataaatactaagaaaaaatggagtgaccaaaagtcactccatcgtggcgcgcttgaagggactcgaacccctgacctactggttcgtagccagtcactctatccagctgagctacaagcgcatctgttttttaacagcttagttattataggctctttttggggaaaagtcaagggttttgcaaaaaaaatcgaaaaaaatttgcgaaaaaagggcggcctgctgtaggccgccctgaaagtcgtgcttattcgcttttttccggttctgcgggcgctttctctttcaggtgcgtctcgatcaagtagcgcggccgctgcttgacctcgctgtaaatcttgccgatgtaggtgccgaccacgccgaggcacaacatctgcaggccgccgagcagccagatcgaggcgacgatcgccgtccagcccgcgactgtcacaccgagcaggtgcgagatcagcgcgtacagaaggccgaaaacgctcagaacagaaatcaggatgccgaggttcgagatcagcttcaggggcttgacgctgaacgaggtgatgccgtcgagcgcgagcgcgaccattttcttgagcgggtatttcgattcgcccgcaaagcgctcgccgcggtcgtaatagacgtagtcgcttttaaagccgatcagcggcacgatgccgcgcagaaagaggttgacctccttgtattccgcgaggccctcgagcgcgcggcggctcatcaggcggtagtctgcgtggttgaacacgatgtccacgccgagcagccgcaggaatttgtagtagccctcggcggtcgagcgcttgaaaaacgtgtccttgtcgcgcttgttgcgcacgccgtagacgacgtcgcagccctccatgtatttttccacgaagcggtcgacggcgtcggtatcgtcctgcaaatcggcgtccatgctgatcgcgcagtcgcacagcggcgcggcggtcatcagcccggcgagcagcgcgttctggtggccgcggttgtgcgcgagcttcacgccgtctacataggggatcgcggcgctgtattcggagatgagggaccatgtctgatcgcggctgccgtcgtccacgtagaggatgcggctttcgcggtcgatcagcccggtgaggatcatcgtgtgcagcttttcggtcagccgtttggtggtttcggggaggacggcctcctcgttatagcagggaatcaccagataaagcaccggtgcggtgcgctcagtcgtcatttgtaaagccctcctttttttccagtgcccggtccgctttcaggcgcggcttcaggcggatcagcgtatggtttgtaaagctggtgttgtgtttctttgcgtagtgcgaaagcgggcgcacgaccatgttgtgcgcgaggatgaccatccggcggcggtacttttcgaccgcgcgcatgcacagcagatagagcacaagcagggcaatgcacagcagcgtgatcaggccgccgagcagcaggccgggcgtctcgtagacaaactcgatttccacatttgtgccggcgttgacgcgaattgccatgaagccgacgtttaccctttcgatgtcggccttttcgccgttgacataggcggtccagcccgattcatacgggatgctgaaaaagacaggcacgtccttttcggtcgagatcgtcgccgtgaagccggtgttcgtgtactggaaagtgtcgcaggccatcgcggcgcggtttgcacagtccgcctcataggcggccgtcgtgtagaggatctggtcggctgtcagctccgtgagcatgtcgctccatttttcggcctgccgccgggtcagcacaaggcccttgagcatcaaaagctcgcgctggttttcagccgccgcctcatacgtttcctcagtcacgtagctgtcgtaggcgaagcccatcgggatgtagttctcgttttcccagatgtcgaagccgttcgcgttgccgtagtacatccagccggtcatcgagggcgaggcgtaatcctcgccggcgaaatacttgtcgtcgtggtcgcagtcgaagaggtacttcacgcttgtcagcgccctaaggccgtagtgcgccgtatcggggcgcgaggccacgtcgcgctgcacgccgatcgaatcgtaaaactccatcagcgaaccgggcacgatgctgtggaacgcctgaatcgactgcacctgccagaacatcgcggagttgtcgaggctttcgtagaaatccacgcgcacgcggtcgtcgcgcagatcctcgatcgagacgtcctcgccgccgttgagcgcgtaggggatgatgtggttgtaggtgtagtcggactgcgttttgccgagcgcgatgaagtagatcgaatacagcgtgattacggcgctcagacagacgaaggaggcgcggaagaattttttcgagccgcgcacgtagaaggtgagcagaaacgccgtgagcgtcaggcagatcagcgcgatcgccacgtagcaccagaagcgcgtcgggtatttctcgagaccgtaggtgacggagacgatctcgccgtcctccttgatgagcgtcggcatcaggccgatcacaagggccgtcacggccgtgatcaccgttgtccacttgatcgagcgcttccagtcgacgcatgggttctcgagcgccatcatcgtggcggctgccatcatcagcgtcagcatgtagaaccagcgggcgtagtacgaggcgttcagaagctggaaagccgcgttgagacccgggacaagcgccatgacgaacaggatccagagcatttttttcagccagtggcggcggcgcatctgcagccagccgatcacgcccgtcatgctgaacatcggcagccacgcgccgagcgaggcccatttcgagccggaatccggcgtgaagttcgggcgcgcgggcagatccggcgggaaaaagagcgattgcaggatgtgcacataccgctggtttttgtcgtagagcagcgcgttccacccgctgatcgggtttgaaacgcggtagttctgcatgatgcacaaaacgctcggcacgagcaggatgcaggagatgccgaggccgagcacggcctcgagcgcgagcagcaggaaattctgcgggctgattttccagcttccggagagcaggcggacaaagaaatagataaccgtgaagcacaccatgccgacgaagaaataatagtttacaatgcagcatgcggcgaccgcgagcgcaaagatgccgcggcggtgcgcatacatgtattcgtccagcgcggcgagcagcagcgggaagaagatgatcgcctcgtggaagtggttgaaaaagatgttgtagaccgaaaagcccgaaaacgcatacagcagcgaagcgagcagcgccgtgctcggactgcgcgcgtagcggtgcaggtatacgtagcccgtcagtgccgccgaggcgaatttcagcatgaagagcgggcccatgagaaattgcagccactcgccggggaacgggatcgtgagccagaaaaatgggctgccgagcaggtaaaacgaatacgagccgatgaagttcgcgccgaggtcggtcaggtggctccagccgatattgcccgagcgcaccgcgtcgtgcgccagccggtaaaacggcacctgctgcacgttgaaatcgccgtaaaaaaggaagcggccgccatccgccagcatgaagggcagaaaaatcacaaaggcaagcgccaaaccgaacaagaaggcatagagaaaataattgccgcgcgtccggctgcgaagccgctcaccggcatgagctttagaggtatccaagagcttgtcctcctgttttctgagtattctataaaaaattatagcacaatcgctgtagggattaaaggcaatttttgttttttaaggaatttttattgaaaagttccggcgcgtcggctacaataaaagggaacaaggaaaggacgggcagacggatggaacagttttttgccatgctttcgcgcatgaaatacatcaatcgatgggggctgatgcgcagcacccagagtgagaatatcgcagagcattcgctcgacgtggcggtgatcgcccacgcgctggcgctgctgcgcacgcggcgcttcggcctgccgtgcgatgcggagcgtgccgcggttctggggcttttccacgatgcgacagagatcatcaccggcgatctgcccacgccggtcaagtaccacagcccggagatccgccgcgcgtacggcgaggtggagtcgctcgcggcgggccgcctgctctcgatgctgcccgaggacctgcgcggcgattacgcgccgcttctttcgggcagcgcgcccggcgacgcggcgctgctgccgctcgttaaggcggcggataagctcagcgcggtcatcaagtgcatcgaggagcgaaaaaccggcaaccgggagttccttgcggccgaggaaacgctgcgccgggcggtcggggatatgcatctgccggaggccgacctgttcgtgcaggaattcctcccggccttcgagcagtcgctcgacgagtacacgcggtaagctgcgcgtattttcagatgcggcgcgccgcatccggcccaaaggggcataaatgttatatgacggtgataaagctatgaaaatcggaaatcttacgctgaacggcgtggcggcgctggccccgatggcgggcgcgaccgaccgctcgttccgcgagatctgctgcgcgttcggcgcggcctactgcgtgacggagatggtctcgacgcgcgcgctgcaatacaactacaaaaagaccgaggagctcatcacgctcggcgaaaaggagcaccccgtcgccatccagcttttcggcgacgacccgctgatcttcgcggcggcggcaaagcgcgcggcgcaggccggccccgatgcgatcgacatcaacatgggctgcccggtgccgaaaatcgccggcaacaactgcggcagcgcgctgatgaaaaagccgccgctgtgcggcgacatcgtgcgcgccgtgaaagcggccgtcgacctgccggtcacggtcaagatccgcaagggctgggacgaaaacagcgtcaacgccgtggaggtcgcgaaatactgcgcggaggccggcgcggatgcgatctgcgtccacggccgcacgcgcacgcagatgtacgagccgcccgccgactgggaaatcatcggcgaggtgaaacggagcgttccggtgccggtcatcggcaacggcgatgtgcgctgcgtgcaggacgccgtcaaaatgatggcagacaccggctgcgacatggtgatggtcgggcgcggcgcgctcggcaacccgtggatcttccgcgagatcaacgggtatttcagcgcgggcctgcgcatcatgccgccgccgacgcttgcggagcgcatcgttgtcgttaagcggcacatcgatgcgctctgcgccgcaaaaggcgaggggcgcggcatgcgcgaggcgagaaagcacgtggcatggtacatgcacggcctgcgcggcgcggcggagctgcgccgcatggcgggcgaactgacggtgcccgccgacctcgatcgcctgctcgagcgggcctacatcgaaaacagagacgagcccccggcgccataagcgcgcccgtttcgggccatactaaatcaagcaacaggcaggaaaggagacgaaaccggtgaaactcttggtactcgacggcaacagcatcgtcaaccgcgcgttttacggcatcaagctgctcacgacgaagagcggcgaattcacaaacggcatcgtcggctttttaaatatcctcgaaaagctcaaggaggagacgcagccggacgcggtcgccatcgcgttcgacatgcgcgcgccgacattccgccacaaggcgtttgcgggctacaaggcgcagcgcaagggcatgccgccggaacttgcggcgcagatgccgctcttaaaggagctgctgcaaaacctcggctaccgcatcgtgacctgcgagggctgggaggccgacgacatcctcggcacgtttgcgaaggcgtgtgaggaaaacggcgacacctgcatgatcgcgaccggcgaccgcgacagcctgcagctcgtatccgatcagacgaccgtgcggcttgcgacgacgaaattcggtcagtccgccgtgacggtctacgacgaggcgaagatacgggaggattacggcgtttcgccgcggcagctcatcgacatcaaggccattcagggcgacacttcggacaatatccccggcgtcgcgggtatcggcgaaaagggcgccggcgagctgatccgggaattcggctccctgcaatacatctacgacaatctcgacacgctcgacatcaagcccggcatgcgcgcgaagctagaggcctccagggacaacgcgtttttgagctacgacctcggcacgatccggcagaacgcgccgatcgacacggcgctcgcggactatgtgccggcggcgggcgatccggccgcggccgccgcactgatgacgcggctcgagcttttcaagctgatggagcggctgcacatcgcgcccggcgcggtggccgcaaaaacggaggcgggcgccggggcggaggcgcttcccgtgcacgaatacagggacggcgcggcggtgctcgcccagtgcgaggaccggggcgaggcgtatttcctgccgaaatgggacggcgacgcgctcgaaaagctctacatctgcggcaaattcggcggcgcggtggagatcgccgcggtcccggcggacgacgcgtttctgcgcgccttcctgtcgagcaaggcgattaagaaatatacggccggcgtcaagcggctgcaccgcgcggcgctgcggctcggcaagtgcctcgagagtaccgcgatggatacggagctcgcggcgtacctcttaaatccttccggctccgactacaccgtgcagcggctcgccgcggaatacggcgtgccgacggcggaatacgaggacgaaacggcgggggccgcggcggcgcttgccggagtctgcgcggctttgcagcgcgccatcgacgagaacggccagcacgagctgctcgaaacaattgagctgccgctcgcgctcgtgctcggcgagatggaggagagcggcttccttgttgaccgcgcggcgatcggcgcatacggcgagcagctcgccgtcgaggccgagcggctgcggcaggagatcttcgaggacgtcggctgcgagttcaacgtcaattcgcccgcgcagctcggcgaggcgctgttcgtaaagctcggtctgccgcacggcaaaaagacaaaaaccggctattcgacgaacgccgacgtgctcgagggcctgcgcgacgtgcaccccgccgtcgacaagatcctgcgcttccgcacgctgtcgaagctcaaatccacgtactgcgaggggcttttgaaggtgatcgcggccgacgggcgcatccactcgaatttcaaccagaccgaaacgcggacgggccgcatctcctcgaccgagccgaatttgcagaatatcccggtgcgcacggcgatcggccgcgaattccgccggtttttcatcgcgccggcggggtataagctcgtcgatgcggactactcgcagatcgagctgcgcgtgctcgcccacgtcgcgaatgacgcgcagatgatcgacgacttcaaatccgggcgcgacatccacacttcgaccgccgcccgcgtgttcgatatgcccgaggaactcgtcacgccgcagatgcgcagccgcgcgaaggccgtcaatttcggcatcgtgtacggcatcggcgcgttctcgctcgcgaaggacatcggcgtcacccggcgcgaggccgaggactacatccacgactacctgaaaaactacaggggcgttgcggagtacatggagcgcgtcgtggaggaggcgaagaaaaagggctatgtggagacgctgttcggccggcggcgctacctgcccgagcttgcgagctcgaacttcaacatgcgcgcgttcggcgagcgcgtggcgcgcaacatgccgattcagggcgcggcggcggacatcatcaagatcgcgatgatccgcgtgcgcgaccgcctgctttcggaaaagctccaagcgcgccttatcttacaggtgcacgacgagctgatcgtcgagtgcccggacgcggaaaccgagcgcgtcgaggcgatcctcgccgaggagatggaaaacgccgtttccctgagcgtgccgatgatcgccgacgcgcagagcggccagagctggtacgcggcaaaggggtgagcgcatgattttctgttgtccggcctgcggcggcgcgctcgaaaggcgggaaagcgcgctcgtctgcccaaagggccacagcttcgacgtcgcgcggcaggggtacgtgcaccttctgccggtcaagcagatgcacgcgaaggtgcccggcgatacaaagcagatggtcgacgcgcggcggcagtttctggcgctcggccattatgacgcgttccgcgacacgctgcaccgcctcgtgtcggcgcatttgccgcagggcggcacggtgctggacgccggctgcggcgaaggcttctacaccgcggcgctcgctgcggccgcgctcgaaaaaaacggccgtacggcgggcatcgacatctcgaaatttgccgtgaaggcggcggccgggcggcacaagggcatcgattttgcggtcgcgagcctctttcacatcccctgcgcggcggaaagcgccgacgtgctgaccgatgtcttcgcgccgatcgtgcccgcggagtttcgccgcgtcctaaagcccggcggcgtgatgatcctcgccgtgcccggcgcgcggcacctctacggcatgaaagaggtgctgtacgacgcgccgtacgaaaacgaggagcacgacaccgattacgagggcttcgaattcctcggcggcgagagcgtgcggcgggagatcaccgtggagggcgcggagaacatcgaggcgctgttttcgatgacgccgtactactggaaaacggacgtcgcgggcggcgagcggctgcggcggctcgacacgctgaaaacggaaatcaagttccgctttctcgtctaccgcaggcgctgaaggcgcgggccgttttcagattgttcacggatttttttgaatattgctacaaaataaggtggaaattatgtgccggctgtggtatattgtttatataccgcgccggcgcgatttgctttttatcgcccgcgcggctttgcagcggcaggcgggaagggagcccgcgccgcggccggttcccgggccgaaaggcggtccgctgccggaaaattaccacagcaagaggtcaaaaaggaaaatgaaaatactgtttgtttgcacgggcaacacgtgcagaagcccgatggcggaggggcttttccgccacgacatggaggcgcggggctttgagaacatcatgtgccagagcgccgggctttccgccgcggagggcgagcaccccgcggaaaacgcggtggcggtctgccgcgagatcggcgtcgacatcagcgggcacatcacgcgccgttttacgccggatgagatcgacatctgggacgtttactttacgatgtccaaaacgcacgcgtacattttggcgcaggccggcgtaccggcggagcgcatctatgtgccgcactacatcgaagatccgttcggcggcgatctcgatacataccgccgctgccgcgacaagctgcgcgaggagctgcaggggttccagcgctttctcggcttttgaattttccggtttcagccggtgctttaggggggcggtaaaatggaaatcgtgcgcatggcggcgtgccatatcccgcagatcgcggcgctcgagcggctgtgcttttcagagccgtggagcgagaaatcgctttcggaggaaatcgagaacccggcggcgtatttcattgcggccgtggaaaacggcgcggtgctcggctacgccggcatgcacaccgtgctcggcgaaagctatgtcgataacatcgccgtgctgctcgcgcaccgcgggcgggggatcggccgcgcgctgactgcggcgctggtcgggcatgcccgggcgggcggcgcgttcattacgctcgaggtgcgcgcctcgaatgtgccggcggtgtcgctttacgcttcgctcggcttcgaaaaggcgggcgtgcggcgggatttttacaaggcgccgcgcgaggacgcgctgatttttacgctgtatttttgatgtgtgagattgtgcgtcggatggattaaaatgcggggcggcctgcgccgctgtgccgggaaaatactggagggtgattttatgctgtacgggaaaattgaggcgctcgtcgggtacgggatccaaacgggcctgatcgagccggacgacgcggtttacacgcgcaaccggttgctcgaggcgttctgcgaggacgactgggcggcagaggcggcggagccgttcgagagcctcggcgcgcttttggacgcgctctgcgatgaggccgttttgcgcgggattatcggggagagcgcgacggagcgcgatttgttcgacacgaagctgatggggcttttgacgatgcgcccctcggcggtgaacgcgcggttccggtcgctgtacgcgcagtctcccgagcaggcgaccgactggttctaccgcttctgcggcgactgcaactacatccgccgcgagcgcgtcgcgcgcgacttaaagtgggtgtacagcgacccgcgcttcggcgacatcgacattacgatcaacctctcgaagcccgagaaggacccgaaggcgattgcggcggcgaaaacgatgaaggcctcgggctacccggcctgcatgctctgcagggaaaatatcggctatgcgggccgcatgaatttcccggcgcgccagaaccaccgcgcggtgccggtcgcgatcaatggggcggactggtatctccagtattccccctacgtctactacaacgagcactgcatcgttttctgcggcgagcacacgccgatgcagatcgacgcgcgcacgttccgaaagctcttcgatttcgtcgggcagtacccgcactacttcctcggctcgaacgccgatctgccgatcgtcggcgggtcgatcctcacgcacgaccactatcagggcggccgctacacgttcgcgatggcgaaggcgaatatcgaggagcactgcacgatccgcggctttgaggatgtggaggcaggcatcctgaattggccggtctccgtgctgcgtttgcgctcgaaggagccggcgcgcctgatcgagctcgcctcgcgcgtgctcgaccgctggcgcggctacacggacgaggcggcgttcatctttgccgagacggacggcgagccgcacaacacgatcacgccgatcgcccgctgtgtaggcggcgtgttcgagctcgatctcgccctgcgcaacaacatcacgaccgaagcgtacccgctcggcgtctatcacccgcacggcgagctgcaccacatcaaaaaggaaaacatcggcctgatcgaggtcatgggccttgcagtgctgccgtcgcggctcaaggcggagctgcagctcctcgccgacgcgctcgtgtgcggcgcggacgttgcggcggacgagcgcatcgcaaagcatgcggactgggcgaaggaagtcgtgcggaagcatccggaactgaacgcggagaatgccgaagcgattctccgcgacgaggtcggcgcggtgttcgtccgggtgctcgaggacgcgggcgtttacaaatgcacgcccgagggccgcgcggcgttccgccggtttatcgagcgcgtgtgacggtgcgcgccggccgccgaacataaaaaaaggggagagaaaaccatggcacttgtggatttcaagtatttttcgcccgcgcttggcatgcagacggcgctcacgatcgttctgccggagatggcgcagggcatcggcgtcggcggcgcgcgggaagaaagcgacgcgccgattccggcgctctacctgctccacggcacgagcgacgaccagacaatctggcagcggcgcacgtcgatcgagcggtacgtggcggaaaagcgcctcgcagtcgtgatgatgacgacgcacctcggcgcgtacacgaaccagcagtacggattccgctacttcgattttgtggcgaaggaagtgccgcaggtctgcgcgcggtatttcaacctgtcgcgccggcgcgaggaaaaatttgtcgccgggctttcgatgggcggctacggcgcgctgaaaatcggcctcgcgctgcccgaagatttttcggtcgtcggcgcgctttccgcgggctgcgaccgcgtcggtattctgccggaggctgtgcgcgggctttccggcattgaggcgctgcgcgcggcccgggaaatgctcgacccggcggattacgcgcgcggcatgcagtttttcgtgaacttcggctcgcccgccgaattcgagcaaaacgacgcggacaacctgttccgcctcgccgaaaaggccaaggcgggcggcacgccgctgccgaagctgattctgcgctgcggcacggaggacgcgctcgcgctcgggccgaaccgccgctttaaggcgcatctcgacgcgctcggcatcgaaaacgactatgcggaattccccggcacgcacagctgggcattctgggacgagcacatacaatatgtgctcgaaaatctgccggtgtgagcagcggaataagagaataaaggtgcagccggcttcgtatggggaagcggctgcaccttttatctgtttttatccgttgttttggagatcctgcgcggttccggaaaagtccatgtccttgagcggctcgctctttgtgccgtcctcgttcaccttctgcatattcgggtagacgagcgcgaggtagctgtcgtcgaggtgcttgtcgagaaaatactggaacgacgatgtggccggaacgccgcggctgcgctcgtcggcgcggatcagcgcggcgcaggaaataaacgcgtcgaagatcatgaacgcggcgagcacgatggtcagcatgccgccgatgcgcttcgggatcttctcgatccagcgcgagatcgcggggtaaaggctcttgagccagatcagcccgagcgtgccccagatcagcccgaacatcaggttcgtgcgcccgtcgatgttgaacggcgtatcgctgtagtcccaggaaacggtgccgaaaacaagctcctgcccgaggctgcacaggtattcgaacgccgccccgatgaagccgctcgcgatgaagatcacggcgctgttctgcctgtagagccggtagaggcagagcgtgatgatcgccgctccgccgccgtaaatcggctggaacgggccgtaaacgaggcccacgcgcagttcaatcgtgtgcgcgatgaagaacgcccagcattcctctaggatgaagccgacgacgcagccgatcaaaaagatccagaacagctttgtcaggttcatgccgaaggcaaacgggcggtcctccgggttcgcaaaggtcgcctcgtattcgtagagattgcgcgcctcgcgctcagcctgccgctttttgcgctccgccgtcgtgatgcggtacgcgtccagctccttttcatactgcgcggaggtcatatcgggcgaggcgctgagaaagcgccgcttgaagaaattcgacttattcaaaagggcggtgtagctttcctcggcgctctcctgcgccttgagcagcttgtcgtcgaggtcgagctcgtcgatcgcttcggcggcgtcgatggccttttcggttacggcgctgccgagcgcgtcgcgcgcttcccgcacacgctcgccgagctcggcgaggctcttgaactgatggctcagcttcgcgacggtgatgaccgtcacaacgatgtcgagcagcagaagcccgaggaaaacgccgaggatgatccagccgatcgtgcggttcacatagttcagaagcagactgaggatggggagcacgaacatcaggatcggcgtgaagatcacgccgcgcagcagagcgagcggcacgcatatgtagcccttgaggttccatttgaacgcggaataatcccgcaggcggatcttcgccgtgcggttcagcacccacgcgaaaagcagctccacgagaaagctcgagagcaggcaggcgaaaagcgttgccaccgcgccgcgctcgaggtgcacggcggtcagcgccgcccacggaagcgcgatcatcaggccgtactgcgggcagtacgggccgttgagcatgccggggttcttgaattttttgtgtacgatggcgttgtatgcgacctccgagagccacccgcagaaggaagccagcataaaataccagagaaatttccaaatgtcgaatgccatgcattcatctcctttttcattcggtatacgaaagtatagcatattccgcgggctgcaacaatactcggaaggaaaaaacgtcaaaaaaagctcgaaatcagccggtgtatggggtatccgggcgcacccgtccgcgtgaggcaacggcgggctggtataaaaaggcggcctgtttcagaaaaagccgtgcgtatttctattaaaccggcaggaagtgtttgaagagtacattttatgaaacatatttatgtgcattctctctatacctatgctgaaatctggcggcgcagtctccgttttgctgtatttgccggaatcgggttccggtcgcttgaaaattcactcgtatttgggtagaattagtcgaaaaaaataaatttgtcctgaggggcagggaaagacgaggaaatcaaatgaaaaaaatatggaacgagtttcgggaattcatcgcgcgcggcaatgtgctcgatatggcggtcggcgttgtggtggcctccgcgttcacgtcggtcgtcaattcagcggttaccgacatcgtcacgccgatcgtgggcctgtttctgccgaatacgacatttgctgagtgggcgccgggcggctttgcgatcggttcgttcatcaatgcggtgatcacgtttttcatcaccgccgcggtgattttcgcggtcatgaaggcgttcaatgcggcgcggggcatggtttcgaaaaaggaggaggcgcctgctgcaccgacgaccaaaacctgcccgtactgcctttcagacgatgtgaagatcggcgccgtgaagtgtccgcactgtgcctctgtgcttccgccggaggaggacggcggaaaaggttctgatttggggaaaatagagggataaaacggcagcgccgcggggaaaccttcccgcggcgcttttccataaggcaggatgtgactttcaatttttatatgattatattcgatatgaatgtttcaaacccggcagcgcgcggggttccgcccgcaggcagaagaaaaatagagaaaggcgaaaccgccgtgccatttgtgcgcggcggttttctgcgtccgtggggggttaggaaaggcggacggaaaaggtgtccggcgcggtgcggcaggtggtgtgcagcaggcagagatcctcgtcgccgtcctttagaaagacgctttcctcatacgaaatcttacagatcagcagaccgcctgagagggtcggactgaggtagaaaaagcggttgatgagaagcgcgtcgttctcgaaaatgtcttggttgacgagggggatccgcgggccctccgcctctgccgcactgttttgtagaattgtgttctttttctcgtccatttcagacaagcctccgtttcattgatcggttctatataatgatactgcaaagtggaaatatataccacgaaacagacttcatagaaaggggatttattgacaaaattcgacgaaaagcacaggacagggccacccggcgcttcagcggtccatcggagccgggcggcgtccttttctgaaagtgcgcataaaaaataaagccgctgcgcgctttcaaaaaacggcggcagaccaaaatactggaatccagatatgcctaaaacgccttacccgtcgtttcgcgccgcctcctcaagccgcgcgaagaggccggcaaaaaatgcgcccgcatcggggcaaaggcgatggaggtacagcacgagtgtttccgcgctgcagcaggatttcccgctttccagatcggcataggcgcgcgtgctcatctccagaatggaggccatcagctcctgcgtcatgccctcggtgttgtggtgcgttttcaggagctcgccgcgaaaatagtccctaagtattgcgtgcagttgttccctcatggtaaattcccttccttgacagaatttaccaaaattctacaaaacatacggccgctgcaccatgatgcaaacatcgggaatctgattcgcggaaatgaattacaaataaaagcgcgggtctttggaagccgtattttcccgtgcgcgcagaaagccgcgccgtcacaggacggcgcggctttcaaaggacggtcaatccgctggggcgggcggctctggggcttctgccgggatgctgatgcgcacgagcgtccccgagccgggcgtgctttcgagcgaaaggccgtattccggcccgaagaactggcgtatgcgctggttgatgttcaaaagcgcgagccccttttggctctcgacgccgaaaaggctctgcgggctcgagccggaaagctccgcatgtattttttgcagtatgtcgggcgggatgccggcgccgttgtccgcgatgcagatctgcaccgtgccgggcgcttcgccgcagcagtaaatgcgcaggcggcccgcgccgtatttgggctcgagaccgtggtagatggcgttttccacaagcggctggaggatgaagcggggcatcttcacagcctgaacgctttctggaatatcgatttcgaaggcgaagcggttgtcgaagcggatggagatgatggagagatactgccggacgatgccgatctcgtcggaaagggcgacgatgtcgcgccccttgatgcagtagcgcatgatctgggcgagcgaatcggctatctgtacgatctcgccgctctcgagcagatagccgtagcccttgatgcagtcgagcgtgttgtagagaaagtgcgggttgatctggctttgcagggccgaaagctcggcgcgcttgctcgcgaggtcgagctcgtacatgttggagttgttccgcaggatcgtgtgcgtcatctccgaaagctcgtcgagcatgcggttgatctgctcggcgagaacgccgacttcgttctcattcttgaggtacagccgcttgtggagctttgagtacgcgtcgcccttcaaaaacctcgagatctcaaagaccggcagggccacggagcggaagatggcgatgccccagaacccgaacagaagcccgagcaaaagcagaacggtgatgccgagaaacagaaggcccgtcaggtcggaattgatctcgttgagcggcaccgcgcccacgacgagccagtccgtattgggcaccgactggaacaggatcatgtggtcgctgccgttgacggagcggaccgccccgttcgcgagcgttccggtgcgcaggttgtggagcaggtctgcggcggcggaatccgtttggctctggttggagacgatcacctcgaggtcgtcgtcgagaacatagaacagggagtgcggcgtcgtctcgaccagattgatgcacttttgcagcgtgttgagggatttcagcacgacgcaggcgccgatttgccgctggagctgcacgtctttcttgatgtcgagaatcggcctgtaataggcgaaatagctcacgccgtcgtagctgttgtgcatcaggccggtgaagccggtggattttccagatagggcgggcagatagtcgctctcgagcgcgtcgatgacggtgaggagcggcttcggcgcgagcgcgacgccgtcctcctccatgatgaggatggcgatctccgagctgtcctgcgtgatggagaagatcgagtttgaaacatcccgcgagttttccagcctcgtgagcgggtcgctgctcgtgagaaaatcctgcgtcgcgttgctggtcgaggcgatctttgcaaagcggatcatatcctccgtggaggtctgtatgttttggacgacctgattgacggagttgcgcacgtatacctcctccttgtcgcggatcaaattgagcacgaaggcgtagtacccgcaggtcgccgcaaagcagaaggcgatgacggtgatcagcataaggatcagcttgcttttgatggagccgagctttttcatggccgggcgcccccttttttctgccggaactccgtgggcgtgaccccgaagaacgccttgaacatcccggtgaagtggtggtagttgcggtagcccacggcataggcgatgtcggtgaccgggcggctcgtggagagaagctgcccggccgccgcgttcatccgcagatggatcaggtatttcgagaaggtaaagcccgtggcggccttgaaaagctcgctgcaataggagtagtttaagctgtatttctgcgcgagggcctgaagcgaaagctcctcggtgtacgacctgcgcacttcctcgagcaggcgctgaaaggcgtcgttcgaggcgctggccacggtgcggatcacgggccgctcggcgctcgtgagcagcaggtcggtctggagctgctcgagcaggcgggcgaggcggccggaggcgtagtcgaaatgcccggccgcgatccggcagccgggaatggaaagcaggcggccaatttcctcctccgcctcgggggccggggccgtggtgaaaagcagcgcccgctgctcgtccttaaaaatggaaaagagctttccgccggcgagggaaagcaggcttttgcaggagggcaccgcggcggcgatgacggtgagcgggttttccgccttggaaaggccgcagaaggcgagcgtttcgtcctgcgttttggggtcgcacaggcgggcgagcaaaagcgggccgtttttcagccggttttgatagaggtgcggttcgagccggtcgagcagtgcggccgattccgccttttgcaggggctttaagcagtagtcgaacgcgccgagctggatggcctgcttcatgtagataaaatccgagtagccgctgatcacgacgaacgcggggcagaacggctgcccgacccgccggcggatgatgtcaaggccggaaaggccgggcatgcggatgtccagaaaggcggcgtcgaagtagcgggcttccaaaaggcgcatcgcctcgaaggcgtcgcacaggctggcggccgtctccatccggtgctcctgaagcgggagagaacgctcggtagacagaagcgccattttttcgttgtctgcaaataagagctgatacataaaagcctccgtacgcaaatatctatccgttttgcttgaaaattccccaaaaaagcaaacattgttatccgaaacgactgtattgtgaagaaattgttaaaatgataccataatcacagcgaaagcacaagaggacgaaaaagaacttcgagggggaaagtgagcgtatgacaacggcgaaagcagccaaaaaaccgctgtggaagcaaatcaaaaagcataaatggatctaccttttcctgctgccgggcattgcgtatctggttttgttcagctacgtgcccatgtacggcctgacgctggcctttaaggatttcaagatcagcgcgggcatcctcggcagcccgtgggccgacccgatctacaagaactttgtgacgatgttcgggcaggacgcattctggcgggcgtttctcaataccttccgcatgggcttctggtatattataaccggatttccggggcccatcattctggcgatgcttctgaatgagctgcgggcgaaccgctacaagaaggtgctgcaaacggtttacacctttccgaatttcctttcgtgggtcatcatcggcggcctgatgacgacgctgttttcctcggagggattcgtcaacatgattatccgcatgtgcggcggggaaacctataatttcctgacgaacgcggacctgatccgcccgctgctctacgcgacgaacgtgtggaagggcgtgggctggagcgcgatcctctacctcgcggcgatggcgggcatcagtcccgagctttacgaggcggccgaggtggacggcgcgaaccgctaccataagatgctgtacatcacgtggccgggcatcaaatcgacggcggtgattttgctgatcctcgcgttcggcggcattatgaacaacggctttgaccagatcctcaacatggtcaaccccgtggtgcaggacgcggctgagaatatggacacgtacatctacagaaaaacgtttcaggacaagccgaactacgggttcagcacggcgatgggccttgcgaaatccgtgatcaacttcgtatttctgctggcggcgaacaagatcgccaagctgctcggggaagggggcatcatgtgatggcgaagaaactgcgcaaaagaaagaagatcgagacgttcgacatcgtcaatgtctgcgttctgacgcttctgatgcttatcgtgctgatcccgttttacctcacgatcatccagtcgttcatgacgcagcaggaatacatcatgaacagcagcaccctctggccgaaggagccgacgctcggcaactaccgcgacatattcgtcggctcgacgatggtgcgctcctttgggaacagcgtgttttacacggtggtcggcgtgatcttcagcatgttcattacgacgacgctggcctacggcctcgccaagaagggctaccccggccgcgcgttttttcagaacatggtgattttcacgatgtatttcagcggcggcctgatcccgttcttcctgctcgtaaagcagctcggcctcatcaacacgcgctgggcgatcatcatcccctcggcgtgcagcattttcaatatgattattctgcgcaatttcttcgagcagcttccgcccgacctcgacgaggcggccacgctggacggcgccggcccgctgcgcatcttctggacgatcgacctgccgctcgttaagccggcgatcgcgacgcttgtgctgttttacgcggtcagccgctggaacgagtggttccacgcgagcctgttcctcggcaacgccaagctgtggccgatgcagctcgagctgcggcagatcctctggtcctcctccggcattgtggacaatatcccgccggaggccggcaggccggcgttttccgagggcctgaaggctgccgccgttatggtgacgatgctgcccatcatgatggtctacccgtttttgcagcgctatttcgttaagggcgtcatgatcggcgccatcaaatcctgaatgtatcgcagctattgcgatcgtataataaaaatttaaaaggagcgttttcaatgaagaaaagatggttatgcacgctactggcccttcttctcacagtttccgcctttgccgggtgcagcggcggcgccgatgcgtcctcgtcctcgaatgccggcgggcaggagacgtcgagagatgcggacgacccctacgccgagcacctgagctttgagatcttctcgatcgacggcgcggaggaaatgctggattacccgctggtcgccgaggcctgcgagaagttcaacattgatttcacggtgcagctcgttgcgtgggacaactgggacgacgtgacccgcacgctggccgcgacggacagcttccccgaggtcatcgcttggtacaacctgaactacgccgaatatgtcgagtgggcgcaggagggcatttttaaggcgctgccgagcgacctctccgcttacccgaacctcgaggcgctgaccgagaagtacacgatctttgaaaagctgctcgtggacggcaacctgtacgcgttcccgaaaatcaagaacaacaacccgtacaacgagtacgattcctacatgttcgcctaccgccgcgactgggccaatgcgatgggcctcgactacgcgccggtgcaggacctgacttgggacgagtttaaggactatctgcgtaaggtcaaggcggaggaccccggccagctcggagaaaagctgatccccttcgattttgaaaacggcggcaacagctggtgcggcttcgcgcgcaagtggaacccgtacatctccggctatgagatggtggacgggcagtacgtttggggtgcgcccgatcccacatcgatggatgcgattttggagattaagagcctgtacgacgagggcctgcttgcggccgacagctacacggatgcgaacaacgccggcaaggagcgctttatggccggccgcagcgccgtgatctacagcaacctcggcccgtcgattctgcaggataccgtgaaccagatggtttcgacgatcgacggctttgaggaggaggacctcggcctgttcaccgtcaagatgggcgacggcaagtacgcggtctcccagatggacgagtggtggggctccttcgcgttcgacaacgactgccgtgacgaggtcatggagcgctggctggccgtcggcaactggctgctcgaggaggagcagatcgaaaagtacgcctacggtgtcgagggcgaggactggacgaaggacgcggacgggaacgtcacgctgaattacaccgctgaggaggcgactgccggcggcgataaggaatacatcacgaaccagcgcgctttccagaagtattttatcctcgaaggcctcgacctgttcctcgagggcaaccccaacgcgagcgactatgtgatcaacgacttgttcaagacgaatatggagacatgggagacaaaccccaactatacgccgagcaactatgacctgacgtatttctcctccacggagaaggatgcgtttgcgtccgtgctgaacggcacctccgacgatttcattcaggcggtcatttcggatgacccggaggcgatctggaaccagtttatcgatgaaaataaggagcaggcggagagagcctgcgccgagatcaacgaggtgttcggcgaataagaccggcacaaaaaggagcgcttcggaaaagcagagccgaggcgctccttcctatatgatgtaagaggaggcattccgatgtgtaaaagccagtacgatctgtcgcagtgcgcgtggcggctcaagggtacggcgccgtacgtgccgctccgcgaaaacagcatggaaacgggcaagccgctcgagggcatcacgggctggataccggcgcaggtgcccggcggcgtggcgctcgcgctttaccgcgccgggtacatcccgcacccgtatgcgggcatgaacagcctgcaatgcgagtggatcgagaacaaatggtggatttatgaggcggaaatcgagctgccgccgcagaaaagcgagagggtgcggctcgatttcgaaggcgtggattacgcgtgctcggtctactggaacggcacgctgctgggcagccacaccggcatgttcgagccgttcggctttgacgttacggcgctgtatgcggcgggcggcaaggccgtgctgcgggtgctgatccgccacgcgcccgacgagatggggcagatcggcagaacgagcgagacattcacgcagaagagccgcttcggctacaagtgggatttctcgacgcgcctcgtcaacctcggcatctggcaaaaggcttttctgaccttctgggacggtattgagattacagatgtatttgcgcgcggggagattgtttcgaaaacggaggggcgcatcgcggtttcaggccgcgcgcagccgcgggcggggcggcgcctttcctgccgcgcagaatgcgccctgcacggcgagcgggcgggcgaagcggcggcggaaatcggctccggcggggaattcgagcttgttgtcccggtagagcagcccgcgctgtggtacccgaacggcctcggcgcgcagccgctctacgatcttgtgctgcggctctatgaggacgggcagcttttggaggagcggcatttgcgcgtcggtatccgcagcgtcgcgtgcgtgcagaacgacggcgcgccctctggggcacggccctatgtgttcgtggtgaacggcaggcggatgtacgtcaagggcgtgaatataacgccgctcgaccacatctacggcgatgtgccgcgcgagcaggtgtacgagacactgcgcagggcgaaagagatgcactgcaatatggtgcgcgtgtggggcggcggcctgatcgagaccgaggcgttttacgactgctgcgatgcgctcggcctgctggtctggcaggaattcatccagtccagctcgggtatcgacaacatcccctcggagaagccggaatttctcgggcttttgaggcggagcgcggaagcggccgtgcggcagaagcggaaccacgcgtgcctcgcggtgtggagcggcggcaacgagctgatggaggccgaccgcacgccctgcactgagcagaaccggaacatcgccatgctggaggagatcgtccgccggctcgaccccggccgcgttttcctgccgacctcggcttcgggtccgagcgagttcatcagcaaaacgcccggccaaagccacgacgtgcacggctggtggcagtatcagggcaacccggagcagtaccgctttttcggcggctcggacagcctgttccacagcgaattcgggtgcgacggcatggcgtctctcgcatcgctgaaaagggtcctgccgcaaaaggcgctgcacccggtgtccatgcgggagagcgacgtctggcgcttccacggcgactggtggtgtacgtaccggcgggagcagacgatgttcggcgcatggaaggatacggagcagtacatcgcgtgcagccagtggatgcaggccgaggggctgcggtatatcctcgaggcgaaccgccggcggtgcttccgcaacagcggcagtatcatctggcagctcaacgagccatggccgaatatctcctgcacgagcctgctcgagtaccacggcgccgcaaaaatggcgtatttctgggcgaaagcggcgttccgcccggtacatcccgcgttcgattacacaaggcttgactacgcgccgggcgggctgctttccggcggactcgcagtgctgcgggatgcgcctgccgcgggcgaaagcaccttgatcgcgcagatctttgacatggcgggcacgtgccttttcgaggaggtccgcagccgcacgcgcgtgcgggagggcgcggaggaattcggcgcgctttgctggcaggtgccggaaagcctgcgcgggctgtttctgctgcgcctcacggcgcatgcggcgggggaggcgcatgccaacacgtattatttcagcacggaagcagaccggccgtaccgtcccgcgctcgaggccgcgccggtgctttgcggcacagcgcggttttccggcggcacggccgacgtggaagtcgggaacacagggtgctcggcggcgctgcatgtgtgcctgtccgatgagacggacagcttcctgctcgacatggaggagaatttcttcacgcttctgcccggcgaaacgaagcggctgcgcgtcggcttcaggcggaaattccgcttcggcttcgacgagaacaccggcgcttccgcggcgtcgcccgtgctgcgtgcggcctgcctgagcggcgaagcgattaggctaaattaaagaaaacggaggaaaacacttatgacggcagaacgtatggagcgcccgaatattttgctgatcctcaccgatcagctccggaaaacgggcctcggatgctacggaaacccggacgtgcagacgccggtgctcgacgccttgtgccgggacggcctgcggtttgacaacagcgtttcatcggcgccggtttgcgcgccgtaccgcacgacgctgcagagcgggctttacccgcaccagcacggcgtgcgcggaaacggcgacctgttcagcccgtgcttcaaggggttggccgaatacttcaacgaggcgggctacgagacctgctttgtcgggaaatctcacttcgggcgcgacgaaatcgaggaaaaagacggctgggtgcggccggaaaaccggctcgggtggaagcactggcacggcaccggcggcgaccaccactacgacacgccggtctacgacgatgcgggaaacctcgacacgcgctatttcggacggtacggcgcgtttgtgcgcacggagcttgcggcggatttcgtccggcagaacgcggagaagccgtggctgctccagctcaattacagcgagccgcacgtcgcgacgatgccggcgctctaccggctccccgcaacgcgggagcgcgtgcgggcgatcaaccgaaagctctgcctcggcctttccgcggaagcgctcgaaaacccgaacagcctgagcttttacgacagctttccgcagcacctgctcacgcagctcttgccgcaggaatacttggatttatacgacccgaagcgcctgcagcttgagccgaacgtgccggagcgttaccggaacgtcacgcggtggttcctgcgcgaatactacgcgatggtgagctgcgtcgacggcgaggtcggcaaaatgctcggtgtgctccgggaaaccgggcagcttcggcgcacgatcgtggtctttacctcggaccacggagacatgctgagcagcggctatctgcgcttcaagggcgtgccgtatcagaacgcctaccgcacgccgctgatcgtctccgggccgggcgtgcggcgcggccataccgacgcgctcgtcagcgccgtcgatatgctgcccacgctgctcgggctggccgggctggaaaagccggcggcgctgcccggcgtttctgcggccgcggaggtgttcgggcggccgggcgcccggcagagcaccgtactgctcgggctcgccacatggcgcggcatctatgacggccggtatttctacgcagccgacaacagaagcggcgcggtcgtgcccgcgcgcctgatcgacacggcgcaggatccgtatgacctgcacaatctggtcgattccgacgcgcacagaacgctgcgcgaggcgctgcacagccggctgctcgagtacctgcgccgcaccggcgaccacgcttttttggcgtgcgcgccggtgcggtgatccgctccagcgaagccgcgcggtatgggggcgggcagactggggccgtgctcttggcggcgcttttccggtataattctgcggccgttatgccgcgaaaatgtccgtgacttttggcgcgcggtgtggtatgctgtaagcggcgctatcggccgccgcaaagcggccggcagggctgttcggtccggtgcggccgcgtgccgggcagacgtgaaattcattcccaaaggagtcagtatggcaacgctcaaggaaatcgcccgcgaggccggtgtcagcgtgatgacggtttccaacgtcatcaaccgcaattacgataaggtttcggccaaaacggccgagcgcgtggaaaaaatcgtgcgcaagcacaactacgtgccgaatctttcggcgcgcagcctcagcggaaagcactcccatatcattgcggttttggtgccggagggcagcctgccggtccgcattttggaggatccctaccgccagaagatgatcggcgcgatggaattctatttccgccagcgcggctactacgtgatgctgcgcgcctataagaccgcggaggagatcatctccctgttccacaactggagcgtggacggcggcgttttcttttacccgcccttttcggacggcgatatggcgcggatactggacacgggcgtgccctgcgttgtgatcgaccgctattacgagaagctcaagccccttacggtcgatctggacgatctgcgcggcggccgcctgcccgcagagctgctgctgaaaaacgggcaccggcgcattgcatttgcctgcccgttccgcagtccatcgatcgtcgtccggcagcgcatccgcggttttgcgcaggtgctgcgcgaggcgggcgtgccgtttccggcgcggtactttttcaattccagcggttccttggaggatggcgtgcgcatcggccgcgcgatctgcgccatgagcgataggcccacggctgtcgtcaccacgctggaccgcctcgccgtggggattctcgagggaatccggctgagcggctacagcgtgcccaacgatatttcgatcgtcggcttcgacaactgggagctgctcgagtatgtgcagccgaagctgacgacggttttgcaggatctggaaaagaaggccgaatgcgtggtcgagcttttgatgcaccgcatccgcggggaggagatcgagcagccgcacgtcacgctggatgtacagctgctcgagcgccagtccgtccgaaaaatctgagccgcagggcggtatttcgactgcacatgcgcgcatatagcgcatatatagaaaacgagcccggatccaaagcggatgaagtagtcaatagttagtagacataaaatttcttatgccaccagttctgttctatacgggactggtggttttccttttagtttgcggacgggtcgttcattgttgaaatagtagattgcctgctcaatggtagatctcagatcatcacattcccagtaacggaagtgcttgcgcagcgtgtccttgaatcgcccccaaaagctttccataactgcgttatcgcgagggtttccggcccttgacatactttgaattacattgtattctttaagcaggttacaataacctgcggatgagtactggacaccttggtcgctgtgcaaaaggatttggtgttcggtgctcatttttcttttcagaaggcgctctgccggcttcataacgaggaaattgtcaaaagtatcgctgagttcccattccagaatctcgttgttgaacagatccaaatagcctgcaagataataccacttgccgttatgtttgatataagtaacatccgtcacaatcttctgcatcggcttctctgctttgaattttctgttcagtacgttggcatagcggatgtgttctaagttggttcctgtggccgcagctttcctgcgcctggtgtatccgtgaattctcagtcgcttcattgacttccaaacagtaggatcactgacgatccaaccgaattcaaggtacagcttatccctgatctggcggtatcccatcattgggtggtgggaatggatgtccaggacataactatccagtattttatgtgttttctcataccggtttaactgtcctgctcgcttcaaccacttgtagtagccgctgcgagaaacaccgtagatttcgcaaagttcgctgacagaatgtttgtctgtctgcttttgaatctcagcatacatctctcggatcatctttttcgggcatcgcccccttttcgttcgttccgtttttttaaacgaagtacctccgcctctttcttaaccagctctcgcttcagcagttcgatctggtattgcagctgctcctcgtaggtcagttccttccggcgctcataacgagataaaggattcccgggtttcttcttaacttccagcccggcttcaccttctgctagatactttctggtccactcttgtattaaccgatgactgcatcctgtttctctttcgagcgaccttgaagtttctcctgctaaattcctctttacaatagctaacttttcttctttgcttcgcatcgtgtatttaccagccatattgccacctccatgtctataatagcataaaaataatggtaggcacttttgtgtctaccattattttatcacttcatccaaagcggatccgggctcgttctttctcgggggctggggattactggagggattcctgataggccgcataggcgtccttctgaatttcgatcagctcctgaaggcccatcgcgtcgagctgctcgaggtaggcgtcccattcgctgtcgatgccgccgtccacgacccagtgcgcgtactgggattcgcagtagtcgtagatgttcgtggtcagagaggccagccgctgtgtctgctcctcggtataggcacagaccgggaaggtcgtgacgatgtattcctcattgaccggatcctcggcgagcttgatgccgtcgccctgatcggcgggcagtgtaaccttatcgtagaacgattcgttcatatacttcgggccgaaatcgcgcatcgagaaggaccacgcggaggtatcgagggaggagccgtcgtccggcacaagcacttcgtaggtgccgtcgtcgttggcctgaattttgctgtcagagatcgagccgtagaaggtttgcagggaggcttcgtctgtgtagtaggcgtcggcccacttgagcagggcggccgggtcctcgcaggctgtggtgatgatcagctcgttgcggctcacgtcgaggaattcgggattgtgctccgcatagcgcttgccgtccgggccggcgagcgcgggaacgggcacgtagtcggaagcgtttacgccgacctgtgcgtcggccgtccagccgaacacgatgccggagagggagccgttcgggtcctgcgttttggccgtgaccatcgaggaatcctgtgtgaaggcctcgggatccagcaggcccttcgtgtacaggccgttgacccacttcacggcttccttgtagttttcctgaattggcatgaagatcggttcaccgctgtcgtccagcgccataaagttggtgccggccgtgccgttgtcgcggcagaccatcgtgccgaagggggccatcaggtggcgcaggtcgccgccgaggccctgcgaggcggaatagccgtattcgtctgcttcgccgttgccgttcgggtcctgtgtgacaaaggcctccagcacagtttcgagatcctcataggtgtcgggcatttcgaggcccagcgcgtcgagccatgtctggttgatgtacatgatgtcgttgacctgcgggcgcagcggcagcttcttgggcaggctgtagatttcgccgtttcggtcggtgatgatggccttcatcgaggcgtccgtctcaaacacccggttgaggttgggcatgttttctgcgatcaggtcggtgagctccacgagattgctcttgttctggttcacatcggtgtcgctcaggcagagcgaaccccagaacgcgtcgggcagatcgccggaggccagcagcagggatttctgctcggcccagtcgccgttgtagtagacctgccagtcgatgttgacgccggtctgctcctcgatttccttcatgacgccgctctcgaggtaatcggtcggccatgcgtctgtccagcggacggtcgcgaccgtaaaggtcggggcatccgcctctgtgctgccgctcgaaccggtgctgctttcgccgccggaggctgtggaggattcgccgccaccgccgcaggccgcgagggaaacggtcatcgcgagcgcgagcagcaggctgaacagcttggttgtttttttcattgcattgactcctttcttgttgcgggggatggtctgaatattttagcttgatggctgcggggagactggaatttatcccttgagcgcgccgatcatcacgccttggttgaaatacttctgcacgaaggggtaaaggcacatgatgggcgcggaggatacgacgatgatcgcgtacttgatgaggtcggcgagctgcgccgcttccacggcggcggagccggtgctcatggcgctgatggtctggttgccgatgaggatgttccgcaggatgatctgcaggggctgcagttccggcgagcggatgtagatcagggcgttaaagtaggagttccactggcccacggcggtccacagggcgatgacggcgattacggccttcgagagcgggagcaccatctggaagaagaaacgcaggttgccgcagccgtcgatctgtgccgcctcccacaggccgtccggcaggctgttggaaaagaaggtgcgcgccacgatgatgtagtaggtgacaacggcgaagggcagcaccatgacgagccgggtatccagcaggccgtagctctgcacggtcatataggtgggaatcaggccgccggtgaagaacatggggatcaggaaaaagaccgtgaaaaagcggcggccgacgagatcgcggcgggagagtgcgtaagcggccggaatgttcgcgataaggctgaacacggtgccgaacagcgcgtagaggatcgtgttgccgtagcccgtccagagctgcggataatcgaagagcttttggtagcccttgaaggtgatgtcgatcgggtagaaggtgatattgcctgccgaaacatccgtcgggttgctgatggaggcgataagcacgaaatacatcgggtacagggtgacgaggatcatcagccccgtgatggtatagaggataacgtcgaacacgacgtcgccctttgtgcggcggatccgccggcgcgcgggctttatggcggcttctgtcatcgtaggtcagctcctttcgctcagatcagagaggtttcgctcagcttgccggaaatccagttcatggagagcagcaaaatgaaattgatcacgttgttgaacaggttgatggcggaggaaaggctgtactggttgctgatcaggcccattttgtagacataggtggagatgatctcgctcgccgtcatgttgagggagttttgcagaaggtagaccttttcgaagccgacgctcatcacgctgcccatgcgcaggatcagcatgatcgtgacggtgggcatcagcattgggatgtcgatgcgcaggatcttctgccatttgctcgcgccgtccacggtggcggcctcgtacagcgtcgggtccacggcggagagcgccgctatgtagaggatgctgtcccagcccacatgctgccaagcctcggtccagacgtaaatgcttgaaaaagcgccgggcaggcccatcaggttcggcagcttcacgcccacgaaggagaggagcttggcgatgacgccggtgctgggcgagaggaacaggatgatcatgccgcacatgacgaccgtggagatgaaatggggcaggtaggtggaaacctgaaagaattttttgtagccccggctgctgatctggttgcacaggagcgcgaccacgatgggcagcgggaaagtgacgaggatggtgtagagactgatgaccagcgtgtttttgatggtcggccaaaattggtaggagttgaaatactcctgaaaatacttcatcccggcccacgggctttcgaaaatccccttggccggcgtgaaatccttgaaggcgatcacgatgccgaccatcggctggtacgtgaacaggagcaaaatcacgacggcgggcaggagaagcaggtaaaggccccagttgcgcgagatgcgccgccacagactgctgcttttggatgcgggggctgcttgaaatgacatgcgtctcattccttccttgaatagaatcgtgcgccggggaacgtgcgccgcttggaggctgttttggaagcgtgcccgggcttaaaatgagtttaacgataaaccttgtttgcccatagcatagcactgataattcgctatgtcaagaatgaatttgttattttaacaaaaattatctgttttttttttttttttttgttgatttaggcgcagatcgatgctatactcattgtggcacaggggagaaagcgccgaaatctattaaaaaaacgcggctgggccgcgcatgaaaggagttcgtatgaaaattcagaattaccgctatctcaatcaggaagtggatgtttcggagaagtttgaaaccatcggaaatattcactttaacgcacagaagctggagaggttcgaccccgcggcgggccggggcaggctgcgctacgcgcggtttgagcgcaaggggcggctgggcttcaacatgtacagcacaccctttgagcccacgcgctcgtggaccttcccgccggcgtatcccgacgacccggactacccgctcgagatctcgctcatcgcggaaaacgtcgtgcgcatccgcaccacctgccgcgcgaacgatgcgctcgagaaccgcgacgcgcagtctctgatgctggacggtgcgcccggggcgctgcccctgcgacccgcagagaccgatgagacgcatgcggtgtaccgcaccggaaagctggagctcgaggtgcagtacgacccgttccatattatcctgcgggacggtgcgggccgggagctgacgcacacgctgcacgcttcggattccatgagcctgcagaactataacccgctgccgttttcctttgtgcgatccgccggggatatgcataaatatccggccgtgagcctcgagatccacccgggcgagcacttctacggctgcggcgagagctttacgcggctcgacaagagcgggcagaagctgattttgtggacgaaggacgcgaacggcgttgaaacgagcgacgtctataagccggtcccgtttttcatgagctcgcgcggctacggcgtgttctaccacacgagctgccccttgacgctcgatttcggcagcgcatacgcacaggcgcagacggcgttcatgggggacgagggcatcgacattttcctcatgaccggcacgccgaaggaggtgctcggcgcttacaccggcctgaccggcaaaagccctctgccgccgctgtggagctttgggctgtggatgtcccgcatcacatacaagagcgaggccgaggcccgcgaggtggcggcggcgctcaagacgcaccgcattccctgcgacgtgatccacctcgacaccgggtggtttgaggaggactggctctgcaactacaagttttcgcccagccgcttcgacgatccgaaaaagatgatagaggatctcaaccgcgcagggtatcgcgtctgcctctggcagatcccgtatttcacgccgaaaaacgagctgttttccgagcttgtctcccgcgggctcgccgtcaaaaatgcagacggacagcttccgaccgacgacgctgtgctggatttttcaaatccggatacggtcgaatggtatgcggaaaagctcggcggcctgttcgagctgggcgtttccgcaatcaaggcggatttcggcgaggccgcgccgctgaccggcgcctatgcctcgggggcctccggctttacggagcacaacctctatccgctgcgctacaataaggccgtctatgaggcgacgatgcggtcgcgcggtgagggcgtgatctggggacgctccgcgtgggcgggcagccagcgttatcccctgcactggggcggcgactgcgagaacaacgatatgggcatgctctgctcgctcaggggcgggctttcgttcggcgcaagcggcttttcctactggagccacgatgtgggcggcttcgtgcgccagagcccggaggagctctacaatcgctggacgttcatgggcattttcacctcgcacatgcgctgccacggcgcgccgccgaaggagccgtgggcgtattcgcagccgttctgcgattccttccggcacatgctcgagctgcgttaccgcctgctgccgtacatcatggcgcagagtgcgctttgctcggcgcagggcctcccgctgctgcgggcaatgttcatcgagtgcccggatgacgagaactgcgccgcgatggaggatgaatacttcttcggcgaggatattttggtcgcgccgctctttgaggccggagattctcgccgggtctacctgcccaccgggcagtgggtagagctcggcacaaaccatgttttccgcggcgggtgctggcacacggtgcaggcgacggtctaccccggcctcgcgttcgtgcgcgccggggcggttctgccgatggcggcgcctgcgctcacgaccgacgccatcgattggagcacggtgcagaacgtcctgttcacagacggcgaagcgcccgtgcacggccatgtcttctgcgcagagacgatgtcagcggcggcgatagaccccgccgcgcctgtgatcccttccaccgcggtcatgtggtgactggatgcaaaaacaaaagcgataaatccgccgtgacaggcgggaaaatgcccgggcgcggtatgcgtccgggcattttctgcggttgggcgggggcggcagatattcggcgcggcactgcgaggcgcctgccggtcgcccggcggcgcggacagaaaaaacggccctccgcacagcgcggaaagccgttttgccgtcagatcgtctcgtagtggtgcgcttctttcagcatcatgtccttgaccttcatcaggcggatctgcgtggagcgctcgttttcgtcgagcttcatcgtgatgtacttgatgttctcctgtaattccgggatcatcacgtgctcgagcgcgttgacacgccggcgcgttttttcgatctccgccgccatgagctggcaggatttctcgacttcggcgagcttcagcatcttcggaaagaccgcggaaagcgagcggatcgcgtcgtcgaggtcgccggtcgtgaaggcgaagccgtaggaatagatgtcgtttgggtcgggcgtgcgcgtcttgaaatcgaaatccgggatctccacgctcatgacgttctgcgtgccggccgaaatcgaaacctcctgcttcggggcgagcagcgcggtgttgagcatttcgtccggcatgccggcgcgtgccagcataaagtcgccgtttgcggcgttcagcgccgtctccacctcctcgcgcagcgccttgttttcgcgcacgcggtcgagaaactggcgcatcagctcatcgcgcttgtctttcagaagcttgtggccgcgcacggccgtgacgagcttctttttcagccgcgtgagctccatgcgggtggggttcacctgtgtgcctgccaccgtgcatcacacctttccgtaatactcgtcgaggaatctgtcgttgatgcgcttgagctcgctgcgcggcagaatcgaaagcagcttccagccgagcgcgagcgtttcctcgatgtcgcggcttgccgcatagccctgcgagacgtattcgctttcaaaggcgtcggcaaatttcgcgtagagcttgtcgatttccgtcaaggcggcttcgccgagaacgaccatcagctcctttgcgtccttgccgcgcgcataggcggcgaagagctggttcatcgtgcttgcgtggtcggcacgcgtcttgccctcgccgatgcccttgtccttgaggcgggagagggagggcagcacgtcgatcggcggcgcgatgttcttccggtacagctcgcggctcaggatgatctgcccctcggtgatgtagccggtcaggtcgggaatcgggtgggttttgtcgtcctcgggcatcgtgaggatcgggatcatcgtgatcgagccggtcttgccgttctgccggcccgcgcgctcgtagagcgaggcgaggtcggtgtacatatagcccgggtagccgcggcggccgggcacctccttgcgcgcggcggaaacctcgcgcagcgcgtcggcgtagttcgtgatatcggtcaggatgacgagcacgtggtagttcttttcaaaggcgaggtactccgcggcggtcagcgccatgcggggcgtcgcgatgcgctcgatggccgggtcgttcgcgaggtttacgaacaggaccgtgcggtcgatggcgccggtctcccgaaagctctcgatgaagaagttcgattcctcgaaggtgatgccgagcgcggcgaatacgacgacgaacgggtcgttcgtgccgcgcaccttggcttgccgggcgatctgcgccgcaagctgggcgtgcggcaggcccgaggccgagaagatcggcagcttctgcccgcgcacgagcgtgttcaggccgtcgatggccgaaacaccggtctgaatgaattcctgcgggtaactgcgcgcggccgggttcatcggcaggccgttgatgtcgtcgcgccgctcgggcagaatttccggcccgccgtcgatcgggcggccgaggccgtcgaaaacgcggccgagcatgtcctcgctcacgccgagttccatcgtgcggccgaggaagcggacgcggctgttcgagaggttgatgcccgtggagctctcaaagagctgcacgagcgcgttgccctcgttgatctcgagcaccttgcagcggcgcttttcgccgtttgcgagctcgatttcggcgagctcgtcgtatgtcacgttttccacgcccttgacgagcatcagcgggccggcgacctcctgtatagttctgtattcctttggcatcagaagtcctccttattctgtacggcgccgttgatttcgagctcgagcgctgtgcagatgtcgctgtattccgccgcggctttttcgggcgcggcatacttgaaccggccgatgcgctcgcgcacgggcagcgcgatcaggtcgtcggccttcgcgcccttttcaagcgccgccgcgcactggtcgtaataccggatgacgagcagcatcatatcgtgctgcttttcaaggctcgtgtacgtgtcggtttcgtcgaatgcgttctggtgcaggaagtcctcgcggatggagcgcgcagcctcgagcttcaggcggtcgggcgcggagagcgcatccatgccgacgagcttcacgatctcctcgagctccgcctcgtcctgcaaaaggcgcatcagccgcgcgcgcagggccatccagtcgtcggcgacgttcgtgttgaaccagcccgccatcgtgtccacgtagagggagtaggaggtcagccagttcacggccgggaagtggcgcttgtaggcgaggttcgaatcgagtccccagaacaccttgacgatgcgcagcgttgcctgcgagaccggttcggaaatatcgccgcccgggggcgacaccgcgccgatgacggagagcgcaccctcgcgcccgtcgcggccgagcgcgatcacgcggcccgcgcgctcatagaactgggcgagacggctgccgaggtaagcggggtagccttcttcgccgggcatctcctcgaggcggccggacatttcgcgcagcgcctccgcccagcgggaggtggagtccgccatcagggcgacggaatagcccatatcgcggaaatactccgcgatcgtgatgccggtgtagatcgaggcctcgcgcgccgcaaccggcatgtcggaggtgttggcgatcagcaccgtgcgcttcatcagggaataaccggttttcgggtccacgagctccggaaactcgtttaaaacgtcggtcatctcgttgccgcgctcgccgcagccgatatacacgacgatgtccgcctccgcccatttcgcgagctggtgctgcacgacggttttgccgctgccgaacgggccgggaacggccgccacgccgcccttcgcgatggggaacagcgtgtcgatgacgcgctgaccggtgacgagcggcatatccggcgagagctttttttggtacggcctgccgcggcggaccggccacttctgcatcagcgtcacgtcgaggctcccgccgttcggtgtgtcaatgacggccaccgtgtcggtcacggtgtattcgcccgcggaaatagagcggatcgtgccgcgcacgccggccggcacgaggatcttgtgcacgacgatctccgtctcctgcacggtgccgagaatgtcgccgccctcgaccgcgtcgccggtctgcatggcgggcagaaagcgccacttcacgccgcgctttagggagggaacctccacgccgcgctttaaattgttgccggaaatctgcatgatcgcgtccagcgggcgctggatgccgtcgtagatcgagctgatgaggcccggtccgagctcgacgctcatcggctcgccggtggattcgaccggggcgccggggccgaggccggaggtctcctcgtagacctgaatcgacgcctcgtcgccgtggatttctatgatttcgccgatcagccgctggtcgctgacgcgcacgacgtcaaacatgttcgcgtcgcgcatgccgcctgcgatgacgagcgggccggctacttttttgattgtgcccttgctcatttgcttcaagtcaccttttccttaatctttttcgttgaagatgatgtcggagccgacggcctgctccaccgactttttgaccatgcggatacccatgcccgtgttgcccgtgacgccgggaatcgggatgatggcgggcagcggcatgagccggtagtggtcgagctcgtgctcgagcaaagcggccagcgcttcggtgatgtagatgacggcgtattcgccctccgcaagcctgcgcagggttttcgagccggcgtctccgtcctccacggggaaaacgtctagcccgagcgccgcaaagccgtagatgctgtcgcggtctccgatgactgctgctctgtacaaaataaaacatcctttccgattggcccgcggggcatctgcgcggcgctttttatcacgcggcatctgcccagagccggctcagatgaagctcacatttcccgaagccgcgcccggatgcgctcgtccgacaggccgttctgcttgccggagaggatgatgcgcacggcggctatctcgttctggcgtgcgatcacgtagccgatcagcggcgcgaccgtaaaataatcctgcctgccgaccgatttgacgagcgcggtctgccggtcgtcgctccacttctcgaaggccgatgcgccggctttaagcggctccacgccgtcggcgtaggcggtacggctcaaatagccgcagacggcttcctcgcttttcagcgcagcctccgtgagctctgcgaggtcgagcgtgtcgcagggggcgaggctctcctctaaaaacgcgcggctcttgccggtgcgctgcgcgcgcacggcaatcttgatgtcggataccgcgaccttgagctccgaaaagccgtcgatcagcaggctgcggctcccgcggcccgcgcggcggatcgccgtgagacaggcgcggtcgagaatcgtgtcgcagcgctggccgtcccgcgtgcggagcagcacctgcatggcctctgccgcaggctccgccatgaagtccggcagggcggaaaaatcgttctgctgcacggcggcctgcatcgcgtccggcggcacggtgccgcccggcataaagacgctgcgcggctctgcgcccgtgacggcgcacttgacggccgccttcaggttgttgaagtctgtggggtacagcagcacgtcgaacggggtgaggtcgggcgtcagctcgcgcatgagcgcccatgttttttccgtttcctcggcgagaaccgcctcggctgttttgccgctgccggtatcccagcccttgtcgccgagcgcgcgcaggcattcggcgggcgttctgcacgccatcagccggtcgatgtcctgctgcgtcaaaagctgtgtttcccgcgccttgatgcgtgccacggcgtaaatgtattcctctgccatcgtgcttctcctttgcgttttccggcggctcatgtgaagagcaggccgcccgcgatgtcctgcagggcgtccgcctccgcctcaaagagcgcgtcgaacgtgcagttcacgtcgatgccgccgcagacgagcaggaaaccgtccggaaggctgcacggtgttctcgacacggtgatgtgcccgcggcctgcggcccggttcacctgcgcctcaaaatctgcgggcaggcggccgaggtcggcggcgttgaggcgcatctcgccgtcgccgtccgccgcatatttctgcacgagcttcaaaagcaccgcgaagtattcgctgtccggcagcgcgtgaagctgcgccttggccgcgccgatcgtgctgcggatcgcggtctgcttcgcggcgagcagcgcgcgcctgcggctgaacgcggcggcggattccgcccggcggcgcaggctttcggcctctgccgcgcctgcggcctcgatttccgcggcttcagcctccgcctcgagcgcggctttttgcagcagcgcctcggcctcctgctcggcagcagcgaccgcgtcgccggccttctgctcggcgtccgcgcggatctgttccaagatcctgtccagtcctgtagccatagcccgctcctttaaatcgcgatgccgccgatgttcgcgacggaaagcagggagacgagcagagccagaacggcgtaggtctcgaccatcgcggggaggatcatcgccttgccgaactggtcggggcgctttgcgagcagcgagatcgaggcgatggaagctctggcctgctgctttgcggagatcaggcccacgattgccatcggcatgcaggccgcgagatagagcaggcctttagcgaacgagatgtcggcggtgccgcccagaatgccgatgttcgtcagcgtgaggaaggcgatcagaaggccgtagatgccctgcgtgcccgggagaagctggaggatcagcaccttgccgaacagggaggggttctcggtgagaacgcccgctgcggcctggccggcaatgccgacgccgatagcggagccgatgccgccgagcagagcggcgaggacggcgccggtcagtgcgagaacgataccgagcgaattgagatcaaagttttccattttacttttcctccgtgattttaaaatattttgtccttgcggcaaacggcgtgaatttgcggccgccgccctcgaaaaacttgccgaaaaattcgacaaactgcaagcggtttgtgtgtacgtatgcgccgagcacgttgatgccgaggttcagcgtgtgcccgatcacaaaggccagaatgaatacggctgcgccgagagggccgctgccggccatcgcgcccatctggttgaacaccgaggcgatgacgcccgtcgcaaggccgagcgcgagcagtctcgagtaggagagaatgtcgctcaaatagcccgagacgccgtacagaccgtagaggccctttaaaaaccgctttccgaagctcttggagctgcgccccgacgtgcagacgatgccgaccgcgccgatgccggcggcagcggcgccgatcgtgcccgcaatggccggcagcgtaaacgaaagcgcgaccatgtcggtgaacatctgcatcgaaagcaggtagacgaccccgccgccgacgagcatgtaccagaaaacgacgtcaaagacggcgtccttccaaagcccctgccgcacgagctggtaaaactgcgcgccgaggccggcgaacaaatggagaatgccgacgaggaacgagaatagcaggagccgcatcgggtcgtcgagcggggcgaaccacacagccggcaaagaaacgtcggcgttgaaaaatgttttgccgatgacggcgaccgcgtcgccgaagaagctaccgaacattgcgccccagaacacggtcgagatgccgcagtacaggaacattttcagcgatttcttgaggccagcctccatgtttttgaatttcacgagcgcgatgccgcagccgatgaccatgaggaggccgtagcccgcgtcggagagcatcatgccgaatagaacgtagtaaaagaccgccatgagcgtgctggggtcgatctcctttttgcccggcatgctgtagctttcgatcacgctttcgacgggcgccgaaaacgcgttgtttttgagctttacgggcacgtcctcgtcctcgccgggcgcttccagctcgacgaaggcgccgaactgcgccgtgagctccgcttcgagcgccgccgcattttccgcggggatataccccgtgataacgaacacgtgcgcgctctgccacaggctgccgagcacgtcgtatttctcgatgcgcatcgaaaaatagtcgatggtgtagcggaaatcggtgcgccggcccgcatgcgtccgaatttctgcctctgcctcgccaatctccgcgcgcagcgcttcgatgcgcgcttgaagcatttcggcgcgctccttcggcggctgcttgctcggctccgccggataggtcagaccgatcgagcgcaggtacgcttcgagctttggccccgcggaggcgtggcacaggaagaaggcgcaggtctgctgcgcgccggcgctcagaatctccaccgcgacgccgtctatatcgggcgcgccctcggcgattttcgcgcgcagcgcctcctccgtgtaggcggtagggaaagagccgatgaacaccgcggtcgaggccgtgccgatcgtgcgcatcgggatatcgagcttcatccacggctccagcatgcggagctgcgtttcgagccgcaggatttcggcgcggttgtccgcgcatttcttccacagcacgttgatgcgcgaggccgccttcagtgcctcgcctgcggcggctgccgtctcctcgtagcgggagagcgcgatcggcgtgcgcccctcgagcgcggcaagcatggatttgcgctccggcgcgagcttgtccagcgcctcgagcgcggcgtgcaggctggctgtgttgttttcgaatcttgctcttgcgggggcggtgtcggtctgccggaaaacggtttcgtccgcctctccggcctcgatctcgacggcgccgcgccgctggatcagttcaaggatctgttttcgacggtttttcagcgcgtagatgctgatgcgctgcatgggcatgaccgccatactgcgacccctcctttcgttttgcgccggtcatccgatgattctgtcgagaatcgcgcggatagctgcggcgctgttttcctgcgcctgccggcgaagctgctctgcgccggcggcggtttcctcctccgcctttcgcgcgcaggcctctgcgtcggcctgcgcctcgcttttcagccgcgcgcaggtctcgcgcgccctttcgaggcgctctgcgcgcagagcgccggcctttccctttgcgtcggcgcggatggcggcgcagcggtgcgcggcgttctccaaaatcttttccgcaccctgttccgcgtttttcacggcgtccagcgtgtctttagccaaaaaatcacctcccgttttatggctgaaaatcctgccagccctgcggccggcatgcccgcggcttgctgttgtttcaccgcatatccggcagaaagcgcgcggcgcgggctttacgcggtgccttcagtccgtttttttgcgttggatatggtgtcattatagtatgatttttcctaatttacaagagaaaagtagtgaaaaattaaataatttgtgtaggaagcgccggacgagcgacagtgcgggcgaaattttagccgcaggaggcgcagaacaccgcaggaaaagaattccttacgaatttctttcgaaaacttaaaaagttaacattttatttatatcttatcctgaaaatatgctataattaacgataatgatattttgagtgcacgggctgtgcggcccgcgaatttacaggaggcaaagtttaaaatgaaagcaaagtcacttcactattcgaagagcggcagcgtacagccgatcgcatcggaaatcggcagagtcatgcagtgcgtatgtgatcagattcccccggcttacccctgcgagggcgagaaggtcgttttcatcggcgtcgagatgaacggcaagctcccgggcccggtcgatcatttctgcaaggaccttaacccgacgagaacgaagggcgtcgcgttttatgttctgaacggcagcggcagcaccgacggcctcgacggcatcatcgccgcgatgaaggcaaacggcgttgaaacgtacggcaagccgctgggcatcgctgtgaagggcggcttcttcaagaagggtacgccgacggatgaggacatcaagaaggcgctcgcgtgggctgacgaaatcgcgaagatgtaaaaccgtacatattgtggaaaaatccataaaaaaagggcggcttcggcggcccttttttctgtttttcagactgtacaaagcggcccgcacggtgtaaactgtacgggataaaaaattctttgtgcggtgcggcttgtgcccggcgggcgcgctcgaatgccgtgctctgtgccatgcggcccggggtattcctccggcgggcggcgcgggcagggaagataaggggtaatgattcagtgacgaaagaaatgacgcacggctcgccgatgaagctgattctcggcttttccatcccgctgtttttcggcaacattttccagcagttttattcgatggtcgacacgatcatcgtcgggcgcgtgctcggcaccggtccgctcgccgcggtcggttccacgggctccgtcacctttttgatcgtcggcttctgcctcggcctgtgcagtggctttgcgattccggtcgcacagcgcttcggcagccgcgactacgaggagctgcgccgcttcatcggcaacgcggtctggctgtgcgccggtttcggcacggtgctcacggtgctcacggtcgtgttctgccgcgacattctcgaactgatgggcacgccggccgacattatcgacgacgcctatgcgtatctcgtgattatttttgcgggtattccggcgacattcctgtacaacatcctctccggcatccagcgcgcgctcggcgacagccgcacgccggttgtgttcctcgtgatcgcttcgatcatcaacattgtgctcgatatcgttctgatcgtattcgtgccgctcggcgttgcgggcgcggcaatcgcgacggtcgtctcccagctcgtttcgggcctcggctgcctgatctacgcgagccgtcactatgaggtgctgcgcatgacgcgcgacaacttcaagctccgcgcgccgtacgtccgccgcctgctcggcatggggcttccgatggcgctgcagacctcgatcacggcgatcggcagcgtgattttgcaggcctccgtcaattcgctcggctcggtcgcggtggcgagcgtcacggcgggcagcaagctgtacatgttcttcgcctgcgcctacgacgcgatgggcgtcacgatgtcgacctacagcggccagaatatcggcgcgcggaagatcgaccgcatcgggcagggcgtgaaagcgtgcagcatcgtcggcatcgtctattcggttttggcgctcgccgtcattttcttcctcggcggctggctgctgctcctgtttgtggacgccggcgagaccgcgatcatcgacgcggcgtatcagtatctgctgacgagcgggcttttcatgattccgctcacgtttgtcaacgtgctgcgcctgacggttcagggcatgggctacagccgcatcgcgatgtttgccggtgtgtttgagatggtcgcgcgcggcgtggtcggcgctgtgttcgtgccgattttcggctttgcggcggcctgcttcgccggcccggtcgcgtggattatggcagatattttcctgttccccgcgtatttctatgtgatgcgccgcgtgcggcagggcgagggcgtgtactgagcccggcggctctataccgccggtgcgcttgccagaaagcagcaaaaccggcgtgtgcgaaaggggggcgaggtatggcgaatatgaagctgagacgcgccttgcggcgcggcgggaaagccgcgctcggccttctggccgtcgcagcggggctgtttttgctgtatcaatgcccgttccggtatgttttcggtgtgtcgtgccccggctgcgggatgacgcgcgcgctgctcgcggcggtgttctccgattttgaaaccgcgttttcgtaccacccgctgtttccgctgctgattccggcggcgctctggcttggcctgcgcgcctgcgggcggctgccctccaaacgggaaaccgcatatattctggcctttgcgggcgcctttatcctcgtgtacgcggcccggctgctttccggcgacccggtggtcgcgcccgagccggcgagcgggcttttgttccgggtgctgcccggtctgctccggtaaaataaaaaacaaaaagctgttcccggggcagggagcagcttttttctttggtttcagagatttgcggagaatcagatgccgtttgcgttgtagctgttcgcaacggcgttcattgcctcgcacaccttgtaggtgtagacgaacggaccgacgaagatcaggctgccgagcacgaaccagagccagaaggtggcggcgctgagattcgtggcaaagccgcgggcgcgcgcttcgctgccgaggcgctcggacatctggtgataccagacgagcgtaaagatgccgcaggtgatcgggccgagcaggaagaaaacgaggcagtagtgcatggttttcttcccgtcgcggcgcatggcggcgatattcaggtcctcgccgatgccggaccagaaaatgatcggataaatgccgcaggtaatgatgccgaaaacgatgtacttccagagcgcgcgctcattgttcatgaccttgagcggcatgggcgccggtgccggctgctgatacggtgtgttgttcatgagatctgccttcctttcacgatgaaaatcaggcggccgcccataccccaaagacgaagccgcatgactgtaaaataaatttaccataacgcggcggcaccgtcaagagtttgaacaaggtttttataaaaaggttgaaaactgtcgaaagtttgtccaatttatacgaaaaccggcataaggggataaaagaaaagcccgcggccggcgggctttgaggcggtgcagtaccgctgtgagcgtgccggccgcggacatgccgcagggcttttttattcttccgcgctgctttcagaggacgcgctgctttcagaggacgcactgctctcggaggacgcactgctctcggaggatgcgctgctttcctccgccgtggaggaggtgccgtttttcgtggtggattcgaacatggagggcttgtagtgatcgatggcctcctgattcagttccacgccgtctacaccggccgcggccgaatcgcgcacgtaattctgatactcctcgcttttgagctcgagcatcagcgtgaggcggtcgtcctcggcgccgagcttttcctcgaccgcgtcgtcaatcggcagacgatgcaggaataccatgtagttgctggcctcaaagacctgaatgtccccctccttcatcgattcgagcgaggtgataaacgcgctggtcatgcgggaggcggtcatgccgtcgcggttgttgacgctctgcacgtagttcgagtcggcgtcgatcgattccgcgtattccgccgcggcttcctcgacggtcagcgtgccgtcggaaacctgctgctcgagtttgtcgagcgccgcagtcacctcggctttttcctcgtccgtcatattctccgaggtgccgtcctccgcctttttcgtcagcggcgcggtgaaatattcgtaattcatgtaggtatcggtgaagtgggcgagcaggtctgcttccggaatctcacgctcgccgccggcgccgtacatcgcctcgaacacctttaagtacatcgcgttgtactgggagtaggcgatgtcaaacgaggtttgcgcgataccgaatttctcgagcgatttgccgaaatagtaccagtagttcgcggttgtctgcgaggcctcggcgtaatcctcgtcggtcatcgaaaggccgaggtgcgtcatttcgtcctgcatccagaaatactggttcatataggcgtttgcgcgcgccgtgatccattccgcggccggggtgtcctccacctcgcccttcagaacctcggtctcggtgtcgatcttcgccgccgcctcgttgtaggcgacggagaggtaatagatgtacgcgccgatgggcagctctgtatcgccctttttcgccgcccaggtcaggttttcgttgtagcagcccgcgaggctgaggctgagaaccgccgcgagcaaaaacgccgccgcgcgtttggcaaattttttcatctttttcaggcctttcgttttagatgtgcttttttgtgtgctttcgctattataccgccgataaagccggttgtccagcatattaacaggggaatgtgtattttctgtgaaggtcagccggcttccgtttcaccgcagaggatcttgagcgcgtcctcgagcacgtcgagcggcggctttccggccagcgcgacgctgatgtacgggcggctgcccgccgagagcattaccttgttcggcatgccctgaatcagccgcttgacgcgctccatgtcgaatttctccttgtagagcaaaatcgcgttcgcctgctgcttgacctcggtgatgccgagcgaggtggcacggctgcgcagcagcgcgatgtcgatcaggccgtaaacgctttcgggcggttcgccgaagcggtcgatcagctcgtcgacgacgtcgctcgaatcctcgtacgtcttgatctcggcgatgcggcggtatacctcgaggcgcagcgccgtggaatcaatgtagctttccgggatgtgcgcctgcacctgcatgtcgaccgagcattcctccaccgggatttcgggcgtttcgcccttcatcagcgcgacggcctcgttcagcagctttaagtacatgtcgtagccgacgctctccatgtggccgtgctgctcgccgccgaggatgttgcccgcgccgcggatctcgaggtcgcgcatcgcgattttgaagccggagccgaactcggtgaactcgcggatcgccgaaaggcgcttttgagagatctcgctcagcaccttgccgcgcgtaaacgtgaagtaggcgtaggcgcggcgcgtgctgcggcccacgcggccgcggagctggtgtagctgcgagaggcccatgcggtcggcgttgtcgatgatcagcgtgttcgcattcggtacgtccacgccggtctcgataatcgtcgtgcagacgagcacgtcgatctcctgctccatcaggcggcgccagacctcggagagctcctgctcgctcatcttgccgtggccgatgccgatgcgcgcctcgggcacgcgcgcccggatgccagcggcgacgcgctcaatggaggcgacgtcgttgtgcaggtagtagacctgcccgccgcggcgcagctctttcttgatcgcgtcagcgatgatgccggggtcgtactcgagcacgtaggtctgtacgggatggcggtcgtgcggcgcttcctcgatgaccgacatatcgcggatgccggagagcgccatgttcagcgtgcgggggatcggcgtcgccgagagcgtcagcacgtcggctgatttgcagacctccttgaggcgttccttttgctgtacgccgaagcgctgctcctcgtcgatgatgacaaggccaagatccttaaactgcacgtccttggagacgagccggtgcgtgccgacgatgagatcgatgctgccgcgcttgagcttgcgcaggatctcgtcctgctggcgcggcgtgcggaagcgcgagagcagctcgacgtcgaccgggaagccctccatgcgctttaaaaccgtctggtaatgctgccatgcgaggatcgtcgtcggcacgaggattgcgcactgcttgccggccgtgacgcacttgaacgccgcgcgcagcgcgacctcggtcttgccgaagccaacgtcgccgcagagcaggcggtccatcggcgactcgcgctccatgtcgtttttgatctcgttgatgcagcggagctggtcctccgtctcgttgtattcgaagtgtgcctcgaaatcgtgctgccagtcggtgtcctcggggaaggcgtaacccttctgtttcatgcgctgggcgtagagcacgatcagctccttcgcaatgtccttgacggcggcgcgcaccttcgttttggccttctgccattcggcgccgccgagccggtgcagcttcacgccggcgtcctcccgcgggccgatgtatttcgcgacgaggtcgagctgcgtgaccggcacgtacagcgtgtcgttcttcgcgtagcgcagcttgatgtagtccttcgtcacgccctgcatgtcgatcttgtggataccctcgaaaatgccgatgccgtgcgtggaatggacgacgtagtcgcccggcacgagctcggcgaggctgtagatctcgcggctgttcttgtcctttttcttcggtttctgcttcgtctgattcacgcgcccgtgcgtgagcagcgtgaatttcacattcgggtattcgaagccggcggagagcgtgccggtcgtcacggccacggtgccgggcgcgacggtcgccgcgttttcgatgtagcccgcgggcaggccggcggcctttaagtcggccgccacggtcatcgcggcgcgctccgtgccggcgagcaccacgcaggcatggcggttgtgcagcgcggccgtgaggtcctcggcgagaagctgcgtgctgccgccccacacagagagctgccgcacggtcatgttcgagagcgactgcaccggcgtgtcgtagctgccgcgcgcgaacgcgtccatgtaaacgctcgcggtgtcctcagcgcggcgcagcgcaaattcgtacgtttcggaatatgtgtcgaggccgcggcagagcacgccctcggcaagcaggccgcgcacgtcctcgccccactgccagagcgttgtgcgcatgcgctccttgagcttcgtcccctcggaaaagaagagcagcgcatccgtgccgaagtagctgaacagcgtcgcgggcgcttcatatataaaggtatagtatttgtcgagcgagccgatgtgcaggccggtctgcaatttttccgcctcgcggagaagaacttcttttgcagccggcgcggccttgccgcgcagcgtgcccgcgtgggcggtgatcttttttgcgagcagcgtccggctgtccggcacgacctcgacggcgggggagatcgtcacgcgctggaccggatcggtgcggcgctgcgtctccgggtcaaaataggagatcgtgtcgatttcgtcgccccagaactcgatgcgcacgggcgcctcgccgccgggtgagaagaaatcgacgatgccgccgcggcgcgcgaactggccggtgccgtcgatctggtcggcgcggatgtagccgcagcgcacaagcgccttcacggcctcctccacggtgatctgctgcccgctctcgagcgccacggtgcgctcgcgcagcttttcgggcggcagggcgtattgcagcgccgcgtcgatcgtcgtcacgatgcagcgcgccccgccgttttgcagcagcgtgagcgcctcgatgcgctggcgctcgtattcgtgcgagctgccctcggtgtcgcgcaggctgaaatcgcgcaggggatagaacgcggcgggcgttcccatcgcgttcagatcctcgatcaggcgggcagcctcggcctcgtcgcccgcgagcagcaggccgggtttttcggtttcggcgagcagcgcgtgcacgatgttcgccttgtggacggaggcgacgccggtgacggcggccggcgttttgccgcgctttacggcgttttcgagggcgcggtattcggggacgcggcgcagcgcgtccgtcagaaaattcatgctcatggcctttcctttcgtgcggttcaggaattgaagcggttcatggccttgtcgggctggccggagaggatcagctccacggcgtcgccggcgtttttcgcgacagcatcgagcagcttttgctcgtcgcccgaaaagcgcgagagcacccagttcgcgagatcccagccctcgggcttgtgccccacgccgatctttacgcgcgggaagcggtcgctgccgcttaaatagatgatgtttttcacgccgttatgcccgccgtcgctgccctttaggcggatgcgcatgcggccgacgtcgagcgagatgtcgtcgaacacgagcagaacgcgctcgggcgggatatggaagaaattcatcgcctccgtcacggactggccgctcaggttcataaaggtcgagggctttaggagcacggcgtcctcgccggcgattttacacttgccgtaaagccccttgaatttgacgcggcgcatgtcgcagccgaagcgctcggcaagcgcatcgaccaccatgaagcccgcgttgtggcgggtcaggtcgtatttcgggccggggttgccgaggccggcgatcagccagcccgcgccgcccggggcgttgtccctcgataaaaatttcagcatattcaggctcctttccttctgcggggccgcttaaagcgcgcgttttccgcgcacgcggaaactgcgcagacgccggggaccccgggcagctgcgctctgtacttgctattatgccaccgaaaccggccgtttgcaagcctattttgtatcgcgcagggcaggaaaatccagaaatacaccgtgtttccccgcacagtgcggaaaaatttccaaaaagcacggatttatcgaaaaaaggtatggaaattctaaaaattatttgctataatagagtgcggcgaaacagcgcgttcgtttttctgttttgtccgacagtgttaatactcggttctgccgatgtaaatttttaggaggtagtttccaatgggcaaaaaatacgtttatttgttcacagagggcaacgccggcatgcgtgagcttctcggcggtaaaggtgcaaacctcgccgagatgacgaatctcggcctgcctgtaccccagggctttaccatttccacagaggcctgcacgcagtactatgaggatggccgccgcatcaacgacgacattcaggctgaaattatggagaacatcgagaagatggagagcatcaccggcaagaagttcggcgatcttgagaacccgcttctcgtttccgtccgttccggcgcacgcgcttcgatgcccggcatgatggatacaattctgaacctcggcctcaacgaagaggttgttgaggttatggcgaagaagtccggcaatccgcgctgggcgtacgactgctacagaagattcatccagatgtattccgacgtcgttatggaagtcggcaagaaatacttcgagcagctcatcgacaagatgaaggaagaaaagggcgttacgcaggacgtcgagctgacggctgacgacctcaaggagctcgcgaaccagttcaaggccgagtacaaggaaaaaatcggcgaggacttcccgagcgacccgaaggagcagctcatgggcgcgatcaaggctgttttccgctcttgggacaacccgcgtgcgaacgtctaccgccgcgacaacgacatcccgtactcctggggcaccgctgtcaacgtgcagatgatggcgttcggcaacatgggcgagacctccggcacgggtgttgcgttcactcgcaacccgtccaccggcgaaaaggttctgaccggcgagttcctgatgaacgcgcagggcgaggacgtcgtcgccggcgtgcgcaccccgcagcatatcgaccagctcaaggaagttatgcctgaagtttacgcgcagttcgtcgagatctgcaacaagctcgagaaccactacagagacatgcaggatatggagttcacgatcgaggacaagcacctctacatgctccagacccgcaacggcaagagaaccccggccgcggcgctgaagatcgcctgcgacctgatcgatgagggcatgatcgacgagaagcaggccgttctgatgatcgagccgagaaacctcgacgcgctgctccacccgcagttcgacgcgaaggccctgaaggccgctacgccggttgcgaaggctctcgcggcatcccccggcgctgcatgcggcaaggtcgtgttcactgctgaggacgcgaaggaatggaacgagaagggcgagaaagtcgttctcgtgcgtctcgagacctctccggaggacatcgagggcatgaaggctgcgcagggcatcctgacggtgcgcggcggcatgacctctcacgcggccgtcgtcgcgcgcggcatgggcacctgctgtgtctccggctgctccgcgatcacgatggacgaggagaacaagaagtttgagcttgccggcaagacgtatcacgagggcgatttcatctccatcgacggttccaccggcaatatctacgacggcatcatcccgacggtcccggcttccgtggactccggcgatttcggccgtatcatgggcctcgcggacaagttccgccagatgaaggtccgcacgaatgcggataccccgcagaatgcgatcgatgcgaagcgcctcggcgccgagggcatcggcctctgccgtaccgagcacatgttcttcgacccggacagaatcgccgcgatccgcgagatgatctgcgccgacaccgtcgagggcagaaaggctgcgcttgcgaagctcgagccgatgcagcagggcgactttgagaagctctacgagacgatggagggcgagccggttaacatccgcttcctcgatcccccgcttcacgagttcgttccgaccgatgaagcagacatcaagctgctggccgattccacgggcaagactgtcgagcaggtcaaggcgatcattgccggtctgcacgagttcaacccgatgatgggccaccgcggctgccgtctggccgtcacctatccggaaatcgccgagatgcagacctccgcggtcatcaaggctgcgctgaatgtttccgcgaagcatccggagtggaacatcgagcccgagatcatgatcccgctcgtcggcgaggtcaaggagcttgcgtacgtcaagggtgttgtcaccgcgacggccgataagctgatcgccgaggccggttcctcgatgaagtataaggtcggcaccatgatcgagatcccgagagccgctctgacggccgatgagatcgcgaaggaggccgaatacttctccttcggcacgaacgacctgacccagatgacgttcggcttcagccgtgacgacgccggcaagttcctcggcgcgtactacgacaagaagatctacgagaacgatccgttcgcgaagctcgatcaggtgggcgtcggcaagctggtcaagatggcctgtgagctcggcaagtccacgagaccggacatcaagctcggcatctgcggcgagcacggcggcgatccgacctctgtcgagttctgccacaacgccggcctgacctacgtgtcctgctctccgttccgcgttccgatcgcgcgcctcgctgctgcgcaggctgcgatccgcaatccgcgcaagtaatgcgggcggcataagccaataaattccgattcctccggctccgcagggcgccggaggaatctttctttataccgccgggccgcacggcatgtatgctcgccgtttttggaagggaaagaggccgccctgcggggcgcgccggagaaaacaggaggaaaatggagaaaatgcagaaaatgctgctcgacacggacatcggcggcgatattggtgacgcggtctgcctcgcctgcctgctgcgcgagccgcggtgtggaaatcgcaagatctgtggatgagatgaaattttacgaaattctgtctgctgtgctggacaaataaggaaaagaaaaggctgtgtaccgggatttccggcgcacggcctttttgcttttggataatctttctggaaatgttcttttgtggagactataattcaggcaatcgggtggaaatactacctaaaaattaacggagggataaccaaatggcgcaaatcatttacggatacatccgcgtatccacaaaagagcagaacgaggacaggcagctgatcgcactttcagaatttcaggtgccgcaggagaacattttcatggataagctcagcggtaaggatttcaaccggccgcagtacaggaagctgatgcgcaggctgcgcccgggcgatgtgctcgtcgtcaaatccatcgaccggcttgggcgcaattacgaggagattttgaaccagtggcgcgtcatcacgaaggacaagcgcgtggatattgtcgtgctcgatatgccgctgctcgacacgcggcagaccgggcgcgacctgaccggcacctttgtcgccgaccttgtgctgcaaatcctctcctatgtggcgcagacggagcgcgagaacatccgccagcgccagcgcgagggcatcgaggcggcgcgcctgcgcggcgtgcgcttcggccgcccgcgcaagacggtgccggaaaatttcgattatttcaggacccagtggcggctggagcagatcagctcgcgcgaagcggcgcggcagctcggcatcgcgcaggacacgtttctgcgctgggcgcacgggaaatgagtgaaaaaaccggcgccgcatagctcggaaacaaaatcccgccctaaaatttgtgatggaaaatgtaggaaatatcgttctttgtctgctggaaaaagtaggaaatatcgttcttgcccagcaagaagattccggcccaaaagcatgtgctttttcacaaaatttgaaacgaatttttataccctttgacgcaaaatacatttcttgtatattataacacagccgaacgaaaaagtctgatatatcggtcgaagctgcgtacgaatgcggccctttgagcgcttaaaatacagcgaaaaatcaaagaatcgaggattttgcaatgaaaaagcgaagcgtttcaaaagcggccgcagtccttttggctgtgctcctgctttgctccgtgggaacgacggcctttgcagcggatgccttgggggcaggctccgccgtcgccgccggagcggcaggcgatgcgccggcggaggaaggggcggcattgccgacgccggacagcgagccggaagcctccggctcgacagatgaatcggaggcctcgccgagcgccgagccatccgtcatgccgagcgccgcgccggagacggaaaccggggaggatgatgcggcgcctacgccgtccgccgcaccggaaaacggcggcctgacggcaagcccagacacgttggccgcgccgattgcggacgagggcttcacatgggatgcggagaccaaaacgctgacgatcacggcggcggacatttcggccattcagacagagctggccgcgcataaaaccgacgcgcagaagctggttatcgatacgacgggcgatattccggagaaggcgttcaacggatttacagccgtggaggagatacagatcgacaatgccggaagcattgggaagcaggcgttctataactgcggcaataacaccaagctgattcgaaatatcaagatcaagaaggccggagatattgcggcagaggctttttataggctgaatggcgcaggcggtacgctgacggtgacggaatgcgggaatatcgcaacggacgcgtttagaaatgcaaagctgtcgggttccgcatccattcaaaaatgcggcgatattgcggcaaatgctttcaggagcgccaacgtaaacggcaatggtgtcacagcgctggagattggcatctgtggttcaatcggagaggatgcctttgcaggtctaagctctctggaaactgcgaaaatagacagcattaccggcgaaattaaggatttgttcagttctttaaagaagctaacatctgttgaaatcggaagctgtgaagacattccccaaaatgctttcgcgtattgtgaagcactaaaggtaattacgatttccaagtgtgcaaacattggatcaaatgcttttagaagttgcaaaagtgtggaagaattgtctattgttgagtgtgcagatatttccagtaatgcgttccttggcatgacggcgcttcggagtgtgaagatcgatacctgcggcaaaattggttcatctgcgtttagttcgatgatgagctctaccggtgctgaaccgtgtaaagctctggaggatgttgtgatcggccaatgcacggaaattggggaatttgcattttaccaactgaaaaatttgaaaaatatcagtattggcgcgtgccagtctgtagggcggatggcctttaccggagtggggaattcggagaatcccattgaaactctggcactggatggcgttaatttaggggaaaatgtttttggctctgcgcatattaataatttggttttgaagaatatggattcagttggttcgcaggcctttgtttcggcaacaatccgcaatattacgatttccaacatatcagagattgggtctgaggcctttgcgtatttaaaaggtttggaaacgcttacaattgaagatttggaggaaatcagcgatacttctttccgaattgaggatgaaggtgtctgcgctgtcgagacgattacactgcgtaatatccggcgaatcggtgcctatgcatttgaaaacttcaagaatttgaaggaagttgttattgaaggcggctgcgaatacatcggcgcgcatgcgttcagtggatgcagcagtttggaatcaatcgatattgccgatgaaacacgcctcggctacagcgattcctttgtcaatcaacagtacgtgcacgaccgtgtagcggcgattctggccggctcgttcgcgctgatcgatacgacgccggccatcgatgaaattttgcccgagggctggacctcggtgaaaaccggcgggcagaacagcacggcgagcgtcggcgatacccagctcaccaaggaagcgaagtgggcggatgcggaggcgaccgtggccgacgtgctgatcaaggcgtactattcggtcaatcagcagatggattttgtctttgtagccgactgctcgaactcgatgtccggctttggcagcgcggatgcgatgaactccaatttctacaacatgcagtcgaagctgatggatgtcaccgagacgctcctgaacgctgaggacctcgacacgcgcgtcgcgtttaccaccttcggcgaggatgagagctccgtttccaagttcttccaaaaggggcagacggccgaggcggaaagctatatctggaacgacatcgtcaactattattccaacacgaattacagccacggccttgcagaagcgctcgaacttgtgaaggagaacaaggcggccggcagaaacacgaccgtgatcttcatctccgacggccagccgtactatgacggcaccacggtgccggaggaatactacggcgccgcagaggcggatgcaatccgcgcggagggcgtgcagatcatcagcgttctccagcaggtgccggagagcgagctggcctcttcgcaggccaacatggagaagatcgcggacaaggtgttttcttccaccgatctggacggcttcagcacggcgatgaacggcgcgatcgactacgcgtacacgacctacacgctgaccgataccgttgatcccgcctttgcgctggacgcagacagcatagaggcttcggccggcgatgtggtggtctcggaggatgaaaacggcaacacagtgctcacgtggacgatcacaaacgcgccgtttgaagagcatacgctttcctttaaggaaaacctgaagccggacgacaaaggcatccgcccgacgggcagcctcgacacgaacgagggcgacgcggtgctctatgccggcagcacgcctgtaaatgcggtcaaaacgccggttttgccgcggggcacgtcgatgaccgtcgaaaaggtttggaagaacgacacggcggatgtgcgcccggacagtgtagaagttacgcttctgcgcgacggcgaagcgtttgaaacggttgagctgacggagcagggcggctggaagtacacttggcccgcgctcgatcccgcgtatacgtggagcgtcggggagacaagcgtccccgagggctatcagtccgcggtgagcggaagcggcgcggcttggacgatcacgaatacatacacggtcgttgccacgctcacaccggcgccgaccgccacccccgcgcccacgccggaggtaacgcccgcgccgacggcgaccccggctccggaagcgaccccgacggctgcaccggaagtgacgccgagcccggccccggagaagcccgcggtggatacgccgaaaaccggcgacgacacgaacccgtttatctggttctcggttatgcttgcagcagcgggaagcatgacggcggtgctggctgtccgcaggcgtgggaagcgtgcgcggcacggcagataagataatgaaataaggacgtgaaagcccgcccggcaggtacagtgcgtactgccgggcgggctgttttttacggtgattcaaaggcaaagccggccgcggtgctcctctgccggattacggcaaggcgtggcctgcttctccgttttcccgcgtgcggaggtccagcacggaggtgcgggggagcagatagggcgggaccatccggtcgcgcaccgccgtgtaacggccgtcaatcatgccgagaatggaatccaccgcgttttccacgacggcttggtcatcgtgcgtcatgacggagatccccatcgcccgggtccacggcgtgtcgtcgtagacgatcagacttatatcctccggaatccgcattcgaagttgcgtcagggcgctgaaggtgacaagcccgaagtattccgcgacggcgatgatggcggtggggcggtgcctttcgacgaggcgcacaacctgctcggcgctgacgtcggacggcagcgcctccaccgggatcgccggcgtttcgatgccggcctttcggtaagcggccgtgcagccgcggatgcggggcgcgtcgttggagacgatcagaatgcggcggtggccgcgccggagcaggtgttctgtcgcgatctccatgccgagcacgtcgtcgtaatgcacggcgctcacatgggggtaaaccttgcagtggagctgcaaaaatttgcagctcttttccttttcgatcagccgctcgaggcgcgggtccacggcgctgttgatcggcgaaaacacgatgcactgcacgtggtaggagagaaaaaatcggatggattccaccatccggtgctcgtattttgtatccggcaccatgatggtcgtgtagccgtgcgcctcgcgcagaacgtcgctgatctgggagatgagctggatgtaaaacgggttgcccgcatccgggttcaaaaaggccacggtgcggtttgtctggcgtttcagcatgctggcggccagattcggcgtatagttcagcttgtgcgcggcagcgagaaccgcggcgcgcgtttgctccttcacgacggcctctccgcgaaaaacgcgcgagaccgtggccggggagacgccggccagcgccgccacatccttacttgttgacataaagcattcctccgattcgctgcgcgacgcgcaaaaattcataccgccccgggtgcaccggcgcgccgggactaagccgcatcaaaaagagcgcatttgacccgaatgagaaaacaggtcaaacacgccccttattttgtgcagttttctgcttgacaggtcaggggaaggcgcgtatgcttgcttgcttgcttgcttgcttgcttgcttgcttgcttgcttgcttgcttgcttgcttgcttgcttgcttgcttgcttgcttgcttgcttgcttgcttgcttgcttgcttgcttgcttgcgcaaattgcgccctgctctgccatcgcgactcagtccttttcatttgattatagatacaataatactaccgtaaaatccgcactttttcaataggaagttttctgtgccgcgatgaaaatcgcctgccggcggaatattcagggtgagacggcgcctgccggcggggaaaagccgcggcatatggcgttttgtagagacctgatataaaaaagaaaaaatcaaataaaattcttgacaaataaaaaactttttgttattatttatgcaaatgacaacgttttcattttgcgttaaatgcttgctctcccgcatattttaaagctgctgcgctatctgctgaggtttaggccgtcttactctgccgttcctcggtatctcttttaccgaaaattgacaacgttgtcacaatctgaaagccggttatccgccggtactggaccggcggcggaaataacaagggaggaatgtgtatggatttgttttacaagccgaggcatgccgcggtcggcgatgtgatccccttttacgacgggcagcggttccggccgttttacctcaaggggaaccgcgggtatttcggggcggatgcgtcgtccggctggacaatgctcaccacggaggaccatctccacttcacggagacgccgaccggtattcgcggcgggacaggctccgtgctctgtgcggacggcgtttaccacctgttctactgcacgttcaagcagaacccgaagcgcgagacgatcaagcatgccgtgagccgggatctgcaatcgtgggagacgcttgagccggagagcttcacagccgacggagagatctacgagctgacggactggcgcgacccctttgtgttctggaacgcagaggagcagaaatggtggatgctggtggccgcgaaggaaaacggtaaaacggcgcgcaggggctgcgttggcctgtgtgtttcggatgatctccatcgctgggcgtaccgcaggccgttttatgcgccgcatctgcacacgagcgcgcacgagtgccccgatctgtttgagatgggcggctggtattatctgatctattcacagtacacggatcgattccagacctactaccgcatgagccgcagtctggcaggcccgtggactgccccggaaaacgacggctttgacacacgctgcttttacgcggctaagtcgggtacggacggcagggaacgcttcctctacggctggaaccccacgcgctactacgacatgtggggcttcaatccgccgatctatgccggaaaggattacaattcctttgactggggcgatacgatgatcgtgcaccggctgcaccagaatcgggacggcacgctggcggtcgcaccgcccgccgcggtggacggtgctttgaaggttcccaacacgctgaaaatggagccgcagaacggcccgtggcgggtggagacatcgtcggcggagacggagaacccgtacggctacagtacgcttttatttgaaaaccgcgtcccggagctctgcaagctcgaaatggagctgaccttttcggagacggtgcgggaggtcggcgtggcgttgcaagtggatgcggcgttcggcgcaggctattatctgagcctgcagccgcaccgcggcaggctggaatttaaatccggcctgcgcatgtacgacgagggcggctggactttcccgtttgacgtggagctggagcggccggcgaggctggaggcaaacgttccccacagcttgaagatcttcgtgcaggacacgattctgctcgcctatctggacgatcaaattgcgctgagcgcgagaatgttcgactatacgcaccgctttttcggcctgtttgcatcggacggaacggcgcggtttgaaaacatccggctttggacctgagagagggagggacgcgatatggagctgttttaccggccgggcgaggccgttctcggcgatgtaatccccttttatgacgcgggggaattcaagccgttttacctgaaaaatacgcgggggcatgcagggccggactgtgaggagggctggcatcggctctcgacgaaggaccacctgcattttacggagtttccggcccacatccgcggcggaaccggctcggttctgaaggtgggcgagctgtaccatatgttttactgcacctttgaggataacccgcgcaggcagttcatccgccacgcgaccagccgcgatttggagcgctgggagacggcggacggggtgcttccggcagacggaaaaatttacgatccggctgaatggcgcgacccctttgtattctggaatgagggggagcaaaagtggtggatgctcatcgcgacggccgtgctggggaaaaccgagcgccgcgcctgcgtcggcctgtgtgtttcggatgatctccgccggtgggcgtatcgggagcccttctatgcgccgatggccgcggccggcgcctgcgaatgcccggatctgttccggatgggggaatggtactacctcgtgttttcgaattactgtgaccgcttccaaacgctctaccgcatgagccggtccctgcggggtccgtggcttgcgccggagcgcgacacgctggattcccgcgcatattatgcggcaaagaccggcacggacgggagccggcggtatatttacggctggaacccgacgaaggagctgccgaagaaaacattcaatccgggaaaccgcatcagccgggactgctgctcgtgggactggggcggcaatctcgtggtgcacgagctcctgcaaaatccggatggcacgctgcgcgtcgtgccggaggcgcacgtggacgccgcgctgcaaacgaggcggccggtcgacgtcaccccggtactgggcggctgcgaggcttcgccgcatgcggtgcggctgcgggcggattgcggctttggcggtgtgctgctggaccggataccggcgctgtgcaagctcgagggagaggtgcggtttaagccgggcacccggcgcttcggcattgcgctgcaggtggacgagcagtacgataccggctactatctctacctcgagcccgggcggaaccggctcgagtacgtctccggcatccgcttttgggggccggacggcgagggcggcaagatgttcccctatgcggtggagctggagcgcccgtttacgctggaggccgaccgtttctacccgttcaagatctttgtgcaggattcggtgctggtggtctacttcggcggcgagatcgcgatgaacgcgcgcatgtacgattacagcggccgccggttcggcctgttcgcgattgacggcgaggcggagttcagaaatttatcgctctgtacggaatgaaccgccggcttcggcacggcgcttccgaaagggatcgggaaaggatggtataccatgagagagataagggcaagcaggcgcacggcgggcaggatcttgcagaaatggcagctttacgttttattgcttccggcgcttgcgtggctggcggttttcgcctattaccctatgtacgggctggtcattgcctttaaggattacaaggggcggatggggatcatgggaagcccatgggccgacccggttttcaaatacttcgaaacctttttcagcacgagcatcgcggtcaacgcgatctggaacacggttgccgtgagcctgctgacgctggtgatcggctttccgattccgatcatttttgcactgctgctcaaccagatccagaagcagcggctgcgcaagacgatacagacgatttcctatgcgccgtattttctttccacggtcattattgtcagcatcatctcgatgctgttctccgcaaacggcgtggtcaataacgtgatcaccggcctcggcggggaagaggtgtttttcacaagcctgcccgaatggttccgaccgctgtatatcggctcgtctgtgtggcagacgatgggcttcaacgcgatcatcttcatcgccgcgctggtcggtatcagcccggactattacgaggcggcaattgtggacggcgccacgcggttccagcgcatcctgcgcatcgacattccgctgattctgccgacgatcattctgatgctgatcctgaatgtcggcaacatcatgaacgtcggctacgagaaggcgttcctgatgcagaacaatatgaacacgacggtcagcgagctgatttccacctatgtgtacaaggtgggcttgcagcaggcgcagtacagctttgccacggcggtcggcttgtttaactcggtctgcaacttcatcctgctggttatcgtaaattttgcagcgaggaagtttagcagcatcagcgtattttgagaggaggcgcgctatggatcggatcaaaagaaagcagggacccatccgccagtcggcgggcgaccgggccttcaatatcgtaaacgctattgttatgacgctgaccacgctggcaatcgtatacccgctttattacgtgctgctggcctcgattacagacccggtggtggtcagctcgggcaagctgctgctttacccggaggccccctattttgagggctacacgcgtgcgctgcactatgcgccgctgtggaccggctacggcaacacgctgaagtacacgcttgtgggcacggcggtcgcgctgttctgcacaatcccggcgggctacgccctctcgaggatagatctgccgggccggcgcgtgctgatgttcctgttcaccttcacgatgtttttcagcggcggcattatcccgctgtatctcgtggtccgccagctccatatgtacgataccatttgggccatcgtgctgcctgtggcggtttcggcgtataacctgatcgtgtgccgctcctttttcgataccggcattccgaacgagctgctggaggccgcgaaaatcgacggctgcaacgactttaagttctttttccgcatcgttctcccgctttcctcaaccatcatcgcggtcatgtgtcttttctatgccaccgcgctttggaacatgttcttcaaccccctgatgttcctctccggcaaggagaacatgccgctgcaagtggttctgcgcgaccttgttctgctgaatcaggcgaacagcatcacgagcagcgcggaggagatcgccatgcggcagaagctcgcggagcagctcaaatactgcattgtcgtgcttgccgccgcgccgctgctgattgtttaccccttcctgcaaaagtattttgcaaagggcgtaatggtcggcgcggtcaaggggtaagccgagaagatacaagtatctttgaaccaagtttgaatcaagaaggaggaaaaatcaatgaaaaagcgaattttgtctttgcttctggcgatctctctgctggcttcgctggcgggctgctccggcgggggagagcctgcgccggaggacggcggcgccacgcccggcatcaccgtggacgaaagcaagtatcccggcctgaccgagcaggaaaaagaggcggtgtcgctgggacttctgaacctcgacggcacgatgccgattattccggatccagacgcctttgaggagaaatacgggcagatcagcatgtttgtccactatacgggcggccgaacccgcccggtcacagagctggaaatcgtcaagatgtgggaggaacagacgggaatacgctttgcatgggaggacgtgccctacgacggcgttgccgaaaaaatcaatctgacgctctcggccgccggcgacgacctgccggactgcttctataactttgtggacggccagtcgggcatttttgcgacgcagtatgccgatcaggatgtgtttatcccgacggaggatatcatcgacaattacatgcccgcgtacaaggcgctgctggacagcaagacggaataccggctggaggcgaccgcgccggacggccacatttacggcttcccctatgtcgaagagatgaaggggcttgtgctcacgcccggcccgtttgagatcaatgcggactggctcgagcaggtggggatggatatgccgacgaccgtcgacgagtgggtcgaatgcctcaaggcgttccgggatgccggcgacctgaacggcaacggcgaggccgacgaggtgccgctcgcggttcagttcgggcagcacgacacctttggctccaacgatctgttctaccgctttacggcggcctttgggcaggcggattcctactgcgagggcaaccgatacgccgaccacctctttatgaaggacggcaaggtgattttctccgcgatggacgaggccttccgcaagacggcggaattctttaacatgctgtgggaggaggacctgatctggaacggctcctttgaggcggacacgagcctgtattttgaaaactccctcttaaaagaggatgtggcggtcgtcggctctttcagcacatggggcggcaaaacctcgatcaacaacatcgatgtgcgcaaccagtacgacagcctgccgcgcctgaaaggcgaaaacggaagcaccggcttccgcctcaacttctctgagctgcaggatacctcgaatacggcgatcacgacgaactgcgaattcccgcatgcgatcgcgctttgggttgaggccattgcggcagacccgaagctcaccgtcatgtccaactggggcacgccgaacgccgtgttcatcgaggaggaggacggctacctgacgaagccgacggatgaaaacggcaaccatattccgcagggagaattcgcagacggaaaggaatccgcgcgcgaaaatacgacgccgtgccgcggctccttcatcatcaaggacgaatacttcgatacggtggcggattacgatgcgccgactttgctcgagggccaaaagacaaacggcaaggatgcgattctggaggaatacgccgacaacgttctgccgaaggtgctgactacggtggaggaatcgtcccgcctctcccagatccagccgaccatctccgatatcgtggaccgctatgtggcggactgggtcatcaacggcgtgacggatgaatcctgggtgacctataagagcgagctgcagtccgcgggcgtagaggagctcgtgcagatctggcagacggcaatcgacagggcgaagggcaacgtataagccaaagcggccgattccggccagcagcgatttaacgtaatttcaaagaatgcggccggggggcctgtctctgcagtgtgcggcggtcaggtcccccggccttttgtgcaaagtggctggcgggaagcggcggccgggtgtgttttgcttaaagcggccggcgcttttccacagccgatgcgcgtgcggtggaaaaagatgcggtgtttgggcggtctgccgcctgtggttcagccgtgcaggcagatgtccagaaagtcctgcgctgcgggcgagagctttcggtctttcttccagatcagcacgattttggtttgcagggacggctcatgcagcgtccggacatgcagcccggcgcacagcccctgcatggactgcgggaagatggcggtggcgagccccgcctcggcccagagcacggcgccgcgcgcgtcgtcgcaggtgcagaatacgtcgggttcgagtttctgcgcgcggaatgcgtcgaggatgagctgctcataccgccggtacaggatcagcgggcggccgggcaggtcggcgaggcgcagcggctcggcggcttccgcctgcgctcccggggcggagaccgcgatcatcggctctgttctcagagcggcggcctccacctcgtcgagccggagcggcgtgcgcgcgacggagatttcgatgatgccctcgagcaggtagtcgtacagtgtgtacgtgctgccgtcgtgcacctcgaagttgacgtccgggtttttctttgcgaacgccgcgacggccggcatcacggtgctgaccgtcgtcggtgtgacacccagacgcagcacgcgcttgcgcccggcctttgcgatttcgagctgcgtggagcgcgcgtaatcgagcaggttggctgcccggctgtacaagagccgcccggcctcggtaagcacgacgccccggcggctccgctcaaacaggcggacgtgcagctcatcctcgagctggcggatctgatagctcagcggcggctgggacatattcagccgccgcgcggcttcgttgatgcttccggtatccgcgatcgtgcgaaagtattcgagctgtctgagctccaaggcaagtccctccgttctccatttttgatacgaaatttatattataaaggcataaaaacaatattatccatattgatgataaacgattatactatagattgtcaagaaaaaagaatggagtcagaaacatgagaagtcttgcagtttatctgaagcagtataagaaggaaagcgtgctcgcgccgctcttcaaactgctggaggtcgtgttcgacctgcttgtgccgctggttgtggcgcagatgatcgacgtcggcgtggcgaccggcaaccggcagtatatcgtcgtttgctttttgattctgctgctgatggccgccgtcggcatggggtgcagctttaccgcgcagttcttcgcggcgaaggcgagcgtcggctttgccgcctccctgcggcaggccgtgttcgaccacgtgcagacgctctcctttacggagctcgacacgatcggcagcgacacgctgatcacgcggctgaccgacgacgtgaatcaggtgcagaacggcctgaacatgggcttgcgccttttgctgcgcagcccgttcatcgtcgtcggcgcgatggtcatggcctttacgatcaacgcccgctgcgccgtcattttcgcggtgtcgatcccggtgctgctggcggtcacctttttcatcatgctggtcagtatcccgctgttcaagaaggcgcagtccggcttggaccgtgtgacgggcctgacgcgcgaaaacctgaccggcgtgcgcgtgatccgcgcgttccgccgcgaggcgcagtcggtcgcggagtttgaggagagcaaccgcgcgctgacaaagctgaacgagtttgtgggccgcatttcggcgctgctcaacccgctcacctacgtgctcatcaatctcgcgacggtgtttttgatcgggcaggcgtcggtggaggtcaacctcggcggcatgcagcaggggcaggtcgtcgcgctttacaactacatgctgcagatcattgtcgagctgatcaagctcgcgtcgctgattatcacgctgaacaagtcgatggcgtgcgcagaccgcgttgcgggtgttttgcaggtgaaaacaagcatgacctatccggaaaacggcggggctgcgggcgaggaaggcgaggacgccgtgcagtttcagaacgtcaccttcacctataagggcgccggcgcgccgagcctcagcgatatcagcttcaccgtgaaaaaagggcagacggtcggcattatcggcggcacaggcagcggcaagacgacgctggtcagcctgatcccgcgcttttacgacgcggtttccggctgcgtgcggatcggcggccgggatgtgcggcgctacacccgggaggcgctgtgcgaaaaggtcggcatcgtccagcagaagcccgtgctgtttcagggcaccatccgggaaaacctcaagtggggcggcgaaaacgctgatgacggcgcgctctgggacgccctttcgacggcgcaggccgcggaggttgtgcgctcgaagccgggcgcgctcgattttgagctggagcagggcggccggaacctctcgggcggccagaagcagcggctgaccatcgcccgcgcgctcgtcaaaaagccggagatcctgatcctcgacgacagtgccagcgcgctggactttgcgacggacgccgcgctgcgcagggcgatccgcgggctcggcgataagacgacgacattcctcgtttcgcagcgcatcgcaggcattcggcaggcggaccacatcctcgtgctcggcaacggccggctggccgggcagggcacgcacgacgagctgatggaaagctgcggcgtctaccgggaaatctacttctcgcagttccccgaggagcgcgcggcatacgaaaaccgcgcggcagggcagaaaggcggcgatctgaatgaaaaataatgcgaatgcaaagccgaaaaagggctttgacggaaagaacagcctcgcggtgctgaaaaagctgttgaagttcatcggccggtacaagctgtttttggtgctgagcgttctgctcgcggcggcgtccgtgattttgcagctttacgtgccgattctgttcggcgcggcgatcgacgagatcgttgcggcgcaccgcgtcgattttgacgcgatgtgggtctacctgcggcaggttctgatcgtcgtcgcggtttcggcgctggcctcgtgggtgatgagccttctgaacaaccgcatgacgtaccgcatcgtgcaggacctgcgtgcgcacgcgatccggcacatccagaagctgccgctctcgtatctcgaccggcacagcaccggcgacatcgtcagccgtgtcatcgcggatacgggcattttgtccgacggcctgctgctcggcttcacgcagcttttctcgggcgtcgtgacggtggcggcgacgctggtgtttatgttctccaaaaatttctggatcacgctgatggtgatcgtgcttacgccgatcagcttccttgtggcgaaattcatcgcctcgcgctcgtacagcatgttccgcaagcaaagcgagacgcgcggccgccagacggcgctgatcgaggagatgatcggcagccagaaagttgtgcgcgcgttcgggtatgagaagaaggcctcgaagcggtttgccgaggtcaacgaagagctgcgccagtgcagccagcaggctgttttctacagcagcctgacaaacccctccacgcgctttgtcaacaacgtgatttatgcgggcgtcgcgcttgtcggcgcattcctgatccccggcggggccctgtcggtcggtgggctcgcggttctgctctcgtatgcgaaccagtatatgaagccgttcaacgacatcagctcggtcgtcacggagatgcagaacgcgctcgcctgcgccgcgcgcatctttgcgctgctcgaggagcagccggaaagcccggatgcggacggcacggtcgaaaacgtgcggggcgaggtcgatatctgcaatgtcgatttcagctacaacaagagccgcaggctgatcgagaacttcagcctgcatgtggagccgggcatgcgcgtcgctatcgtggggccgaccggctgcggcaagacgacgttcatcaaccttctgatgcgcttctacgatgtggacggcggcagcatcgccgtagacgggcgcccgatcgaaacgctctcccgccatgcgctgcgcggctgctacggcatggttttgcaggatacgtggatcaagcagggcaccgtgcgcgacaacatctgcttcggccggccggacgccgcggaggaggagatcatccgggcggcgaaggaggcgcacagttgggagtttatcgagcggctgccgcaggggctcgacaccgtcctgcatgaggacagcatcagccaggggcagaagcagcttttgtgcatcacgcgcgtgatgctctgcctgccgccgatgctgattctcgacgaggctacctcgagcatcgatacgcgcacggaattgcaggtacaggaggcgtttgacaagctgatgcagggccgcacgagcttcgtcgtcgcgcaccggctctccaccgtgcgcaacgcgtcgctgatcctcgtcatgcgcgacggaaaaatcatcgagcaggggcggcacgaggcgctgctcgagaagggcggcttctacagcgagctgtacaacagccagttccagccctcttaagtataaaagaaatccgggaaccgacgccgtttaggcggtgcggttcccggatttttttgtgattttaaggcgcgtcaggcccgcgcgcaagtacaccgcagcctgtgtttttatgcccggcctgcaaagcagaatcgacgtataaagaaaacggtgctcagccgaatttacagaggttcggaaaacaggatttgtacggcagcaaggtgatccgataataagaaaaatatactttataaaaaatccagcgctctgaaagttaggaagtgcacttcatagtgcttccattaagaataaggtaagatttccatgaaaatagtcgaaaaatggaggtcttgtcaaaatgagcgatgattttaaagccgtattgaaggaaatgttctccaaaagagcggaggaaatccgcacagagaaggggctgtcgcaggaggaaatggccgagctgctgcatgtgacgccgcgcgcctacaacgacctgaagcaggggcgctactgcttttccctgctgccggccatgttcctgctttcggaggaggacaacgactgggtcatggattttttgcgggatttccgcagagcggccgaggagatcgaacggcggagctgatcccctccgccgaaaccccggcgggtgtacggcggtgtatagcagcgccgccgatcccggccgtgtttccgcgcgccggaagaacgcacgctgaaacggggggcggagatacagagcggattgcagatgaggggggcgtgggcaaaactttgcgcgcccttcgtttatgccgcatgcagcgggcggcggtgcagacagccgatctatgcggggtgtggctgataaaaaaagagaggaggcaagggggagcgggcatccgcatcagatgatcgaccggtacgatgaggaaaatccgtgcccgtattttgtcggctgcgacaacacggacgcttcgatgcaggccgtagaggcgcttttaaagctggggcacaggaggtccgcttcgtgagctatgatttcttcctcagctccgagcaggcgcggtttgacggatactgcactgccatgcgccatgcagggtatacggtgcaggcggaggatctgctcagccacagggatatggatcgtcttgtcgaggcggtgcggacgggggcgtgtaccgcgctcgtctgctgcaacgataagctggccggcaaggttctgcatgtactgctggaaaacggggtgcggattccggaggatgtgtccgtctttggctttgacgattgggaaaagaaccgggagctgccgatggggctttcgacgatgcggcaggatttcgaggagatcggcggaatggcggcaaacctcctatgcagcgtgattcaggggcattttaagaaaggccggaaggagtttttatccaaggcggagcttctgctgcgggatacggtcgggcctgcgccggaaaaataaatgtgcgcagggcttctgtgcctagacgcacgaaaaataaaagcaagggagagtccgcggcattctaaagtgctgcgggctctcccttttttctttattctatcattccgtcgcggcgatggcgacctcgtggtcagccgcgccgtaatacatcaggtagcgtcccttgaagtagacgagattctctagaaagacgtttccggattttccgttttttgaccatctccaaatgtcgtagctttctgtcggccaaatgaaggggcgcgtcgtgcgcatgatgacgcaggtggggttttggggatcgagcagaagctgtccgccggcggcgggttggcctccgcggagggcggagcagaggcctctgcggaaagcggctgattttgcccagcttgtcggagatgttgtcgaggaagctgccgcaatagacaggtggtctatggggcagatggcaaagaatgacttttttccttcctgtaagtggtgggagatacgttaaagtatcgtttgaaaagacggcagaaataattgtaatcgccgtaaccaacctgtgcagcgatttccaccagagaggattcggtttccgtaagcagtgcacttgccttttccatgcggatattcagtaggtatccggtgatggtgcaaccggtgaattttttgaagatctcacacagataggtgggggtcaggtagaattcacgggaaatacggtttagattcagttcttcgttgtagtgttggtagagatactctttcatgcttgaaactgtcttgggaatttggatcagttcctcttgctcgggctgattggtgttgagaagttgcatgagataatcgaagatttcagcagtgtttgagaatttcgaagaaatgtcgtcgaaaaaaaatttttccagattaatctcttggcttttctgactgaactcttttctggggaggatagaacaagtgaggcgggagatcagtataagcacggaggcaggattgctttgaaatttccattggtcaacaagacgtgaaagctcccaataaatctttttgctgtccttttcctcgtagagcttttgcagggtgtccatccaacgttccacctctgtcaaattgggcggagcgtacagatagcagtcgaagcggtcttgcagacgagtgcagcacaacgcacaatttgcttggcgaaacatgttgtggtattctttgagggaagcgccgggctgactcagcccgatagagacgttgctttcccggctccattgctgcagacgcaccacatcgcagggagaggattgcgtacgggagagcgccatacatagtacgtgaccgccatagatatttactggatgcgataaaacagtattttctgggaggggcagtttcaggaacttgtcattgtcgatgaggataagttggtaagagcttccggtttcagctagcttttcgcgccctttccatgcgtgctgaaaaaaagcatcaaaattcatcggatcgataggaatgctggtttcacttcggttgcgttcttccagtgacttttttacccgttgcagtgccacgaccagctctgatttttttaaaggcttgagtaggtagccataagccccatgatggattgccttttgggctacagagaaatcactgtagccgctcaaaatgatgaattctgtgggaattccctcttcacggatcatttccataagcacgtcaccattgattttgggcatgtgaatgtctaaaaggagcagatccggctcgttttcccggatactgtgcagggcctgttccggatcgctgaactgcccggaaatggaaaagccctgttcttcccagtctaacatttccgctaggccacgcacgatccactcttcgtcgtctaaaagcataactgtgtgcagtgtcataagatttactccttttctggtggcagccaaattctgatgcaggtgtaaaagccgtagcgtgaggatatttccatgcggctttctccattataggccagcttgagccgttggttaatattgaacaggccgatgttagaatcggaggacggtgccagttcgtcgctgtctttttgcaattgagcgttgagctgcttggctctggctggcggtatgccgaagccgttgtccgccaccagaaggcacagttcgccatttgtttccaaagaagcccggattagcaggcaacagggcgcttctctgccctcaaagccatgctttacggcattttccaataagggctgtaaaatcattttttgcacttttttctccctgcattcttgggaaatgctggttttgagaaaataccgattggttgtgcgttgtgcaataacattgtaataattttccgcgtgggtgatttcttgctggagcgtgaccactgtggcatcgcttacggaataacggaaaagatcagccatggaggtacagatgctttcaatacaggaaatgccagaaatgcgggccattgcagaaatacattccagcgtgttatacaaaaagtgagggttaatctggctgcggtagtattgaagttgggcctgttttttcagtagggaagcttgatacagttttttgtgcgccgcctcctgctccaattccatctggctgattttgtcaagcatatcgttgatgcttccagacagcagatcaatctcctccacctgtacggagtcgatgcgggtgccgctttcatttttcaaatcgattttttgaatatccataagaagttttcgcaggggagcagaaagctgatgagtgccgattccaagcaacaccgacagcaaaagaattcccgtgaggatgaaaaacagaattatagctttaatgggggccagatcgcgggaaaaagccgattccggtgcggtgattatcgcgtcccaagaggtgccttccagactgtggcggaaagccaaagaggtttccctattaagagagaatacatttccgccgtagtttaccgtagcgagcttggtctcttcctgtgtggacagcgggcggttggagaataccaaccgacttccctccattaatacgaccgtcatcccatcgatatccagtccgtctaagtggcgttctcccagattctgcaacttagctaatattaggcaggttgcagcaggttcagcggaaaaatccccttcgatgagagagtagatagggtaaacaaaaagaaaataaggggtagaaacgtcagtcggtgagaatgtgttgtagattaccggggagaaaaaggctgtttttccctgatccagtgggcttaggctctggttttccgcgacggttcgtagtaacgtggcatattccccgttgctctgaattagtatgccgtttgacttgacaaaggcgatctcacagatatccggcgaaaaagccatgatatttgaaagaagatccgtggctgcatgttgggcttcagcccggagataagtggacgtttcaaacaggaactcctgaacgctgcgggaataggaagctaggttagctgtacgctgaatctcctgcaaataagtcgaaacactctgttctgccttagctgaaatcccctcgaaatattcaagagagcgcttttggctcagtgtgtcagtgagacagtaaaacagaattccgaatattgtgagcaagatcagagagatcagtgtcagatagcgcggaattgtccgcagcgttcttttcttcatgctattcctttcttggttataaagccaaatatagaaagaacagccgctcgattccgggcggctattccttcatttagttttagctagcgagttctgtgttgatttcatccagtacgacagagacctgcggtgttttttcttcgacccaagctctccagttgtcttcgatatcgccgtccatgacgataagcttggcaaattcttctccgtagttgtatttggtcttttcgtaattggacgaagtgaagaagttcagatcccagtcgattagggcgacggtaccctggtcgcatccatctttctgcttgccggcaaagcgggcgtctacgacttccttgatgtctttatctaggccggggtcgaccagaccgaaaccgtcgggcaggatggacaggttgttatacagtggattcagagaaggatagatggtatccagattgacgaagttcccatcagaatccttttcgcgcaagatggtgatatcaccgttttcgccgcgctcccagtccttgccttcaaagcccatgcggatcaggttctgcccctcatcggaagctgaatattccagcaggtccatcaaacgctcaaatttcgcgtcctccatcgtgggggagaagatagaggcagtccagtagttcgaaatctcttttgaataatacttgccgtcatcgccgaccagataggccatatgcaagtcggtttttggattgccgccggagttggtggcgtagcgttcagaggtgagtttcatgctgcggccgaagccttggttgaagatgacgccggcaataccggattcatagtgcgaaacctcctcctgattcttcagtgcaaagaaatcagggttgatgagaccctcgcgataggcttgagaatagagcttgaggccctccagtgtgctttcctctgcggcgccccaaatgtatttcccgctttcatctttatagaagtcgccgtaatgaacattataagggctaatgaatacatttgcaaggttgtccgggctcatatcgatggccagcgtttttccgttgccgacaggatcggcttctttgatcaggcgtgcatactccatgatctctctggggctgtatttatccttgacttcaaagccgacgtctctggcccagtcctgccggatccacagattggtgtgggtgaccaacggtgtggtgggcatatcgaagtaggtgacgcgtgggatcatatatccggcgcccagcttttcttccagtgcctccgcgatgccagtgtttttatataccttagccatattgggccagcggtctttccagccgtcgggcagttggcgaataagaccctgctcggtgtaatttatgtagtcgccgtaattgaaatcccacatgacgaagtcgggcatgtcgttggagttgatccagatgcggatcttttcactccagttgtcccaggtcagcgcgatcggctcccattctatgttgaatttttcctgaaaatgcttggagagctcgtccgcattgtaatccacgccctccaccatagctacagccgcataggaaatagtcattttctcgctgtaatcggtgctgtcggaagacagctctgtgtcagacacgggggtgcctccggacgtggtggtgtcggtgcctccgctgcaggctgtcatgccgacgactagcgttacggccagaaaggccgccaatagtttttgtgccagtttcatgatgttttcctccttgtaataagttttatggatttttagctggatatccggcattttcccgttttatttttccgctgtctatttgtgaacatcaggccttaatcgctccgaccagtacgcccttgacgaagtatttctgcaggaatggatagaccaccatgatgggagccatcgtgaccactacggctgccatcttcatgccctgcgcgaagcgcactacactatcactggccgctgatgagccacctaatgcggatgaatcgatcatttgagcgtcaatgacgatagaacgtaacaccagctgtagcggtgtcatgttcatatcccggatgaacaccatagcattgaaccattcgttccagcggtcgacagcatagaacagcgtaatggtagccaaaatcggcgccgatagcggaagaatgatgtgaaaaagaatggtccattcgctggcaccgtctatctttgcggattcaatcaaagcttccggcaaggacatgaaataattgcgcatgatgataaggtagaaggtattgataccggataccaaaattaccgaccatatgctgttggtgagccccagtgatttcacttgcaggtacaacgggatgatgccgccggaaaaaaacatggtgaacaaagcatacagcataaacagtttttttcccggaaaagcgggcttggacagcgcataggctgtgcatatggtcaaaagcatgttgaccggaaggcccagcaacaggatgaggagggtcgtgcggtagccgatccagatacgaccgtcctgaaacagggcgctataggaatccagagtgggatttgcagggaagatcacaaagggagagcggacgtattcaccctcagaagtgatactaatgaccagcacgtttaaaaacggaatgacaatgagaagagcgagcagcgtgaggataaggtaggacatgacgagtacgccgtccagtcttttttctcccacgatggaggaaactacttcgccgttttttttctttttcaaagttgatcctcctttcaagcaaacaggccgttctcgcctaccattttggcaatacggtcacaggcgatgagaaacacgaagttaattaccgatttgaatagcgcaatggctgtggagaaggaaaagtcggcggaggattggaaagtgatccggtagatataggtatcaaggatatcggatacattgcgcacggcaggattgctcagattaaagatctggtcaaatccggcattcataatgccaccaacagccagaatgaatagtactacgatcgtggctttaatacccggcagtgtgatatacagcatcttttgtaggcgtcctgcgccatctattgttgcagcttcgtactgttccgtatcgattccggagatcgctgccatatagataatcgcgctccatccggcacttttccaattttccgtaatatacagcatgggacggaagaggctttcatccccaaggaaattgaccggttctatgcccacggcgcccatcatagcgttaactgtgccattgttaccaaaaagattcaaaatcatgctggccacgatgacccaggaaaggaagtggggaaacgtatagatcgtttgcagtatctttttatagcgctgactgcgcagctcattgagtagaagcgctataaaaatgggaaccggaaattgaaagagaagtcggcagagactgatgacgaccgtattgcccagcgcacggaaaaaatccggatcccgaaaaacgaaatcataattctgcaaaccgacccaaggactgccccaaacgcctagattagccttgtagtctttgaaggccaagctcagaccgcccataggcatgtaacagaaaacaccgtaccagatcagtcccggaagaagcagaacgtatatctgccaatttaataggatttttttccataggctccccttggccgggggacccttcagcctgttttgttttgcgactgtcatggatagttccctccttttcacgttgcgcctttattttagcagacagcgttctttggagtatagcacaattttattgtgtgattaaactattttttggtttagctttttgagaattggaatatcccaaaattgtgaaattctatcctaaaataatccttgctctttgtcctcccttttttttatactaggtactggaacgggcaattgcccaatattttgagaaggagcgataatatggagcagaaagacctgcccacttatcttctcacctatgaccatgggggatacattctttggggcgaacatttcaaggaacgactagacagcgcaatagattggctggaaaaatacccctcgttcaagctgggactggacaatgaatcctttgcctacgaccagtacgcggagacccaaccggagatcattgcgtttgtaaaggagaaactgcaggcgtttgctggcagacttgcgattggttcatccacgtatgggcaaccgctctctgtatttgtcaacgaagaatccaatgtacgccaactcacttatgcgattcgggccaatctaaagcatttcggccagacgccggcggtatacgcggtcagcgagcacgctttgcacagtcagatccctcagctggttagcctgtgcggatatcgggctgccgtaatgcgcacgcatttcatgatgtatggctacaatccaacatattcggtaggatatgggacatgggaaggagtggacggaacggagattgcgactgtgcctacttatgacggtgagggcgcggaattcggtatgactacctatgataactgggtgctgacacgctggcctgatcagacggatcgctctttagaagattttgtggctaaatttcctgatatttgcccgctgttagcttcccgatacgacgacatcgttctgcgctgcgagggactaacgcagtatgtggaggcgcgtagggaccaatatcagtggatcttgttggaagaaattccggcactgttcggcgagccgcagatgaaatttgctcccggcgctaatgaatttgtggtgcgtatgccttggggatactgcggcaatcaaatttttaacggttgtcggcagggggagttgagtgtcctgacggctgaacggctgaatgcatgggccgtgctggccggcggagaattgcagcagaatctgctggaggaaagctggaaaaagttgttggttacccagcaccatgatattcagatttgcggtttgctggaggataaggaaagatttctttcccgctcgctgcaagcatctcggcaggtcgcggagtcgtcacttgcctatttgtcccagcagtttgagacggatggcgatagatatgtgatggtatataatcctctttcgtatcctgtccgccagacggtggagcatcaggtatcctatcccagaggaaagggcggcacggaattttccctgtggtttggtgcggaggagatcccctgcgaatatgaggcgctggattataaggcggagcggatcagcaggctgaacctgcgctttacggtttccgtaccagcgcagtccatccgctgctatcggatttccacgcatgccgggaggctttctgagcaggcaacacggaaggtgctttttggagaagtgatcgagacgcccgagtatacgttggagctggacgagggtggtatccgcacgctgagaaaggggagtgcttgctggttctgtcgggaacagggtgctctatttgccggtgttatcgacgagaagtcagcggtatcccatggctcatggagtgtggctagtcgggggagtctgatcgaggcggaatatctggggcatatcgggacgataggtattcaatttacgatgaccttggctggtcggcggatagattgccgcgtgaaattcatccatcatggggagaaaattggctcggcagcacaaccggagtcctttaaagacaaccagaacggctttgtccatgaggataagctccgcttcctgttgccgttgcagctgggagaggcctttggtgtacgtgatctaccctttttggtggaggaaacggacgaccgatatattcagggtaattactggacggcgtgtggcgacggcagaataggcatagcctgctttaatcggggctccatgtgtatggtacgtgagcaagaaggtgtttctatccctttggaatatgctaacgattatgtgtggggatcccgcgcgctgtacggcgagatcgagcatgaatttgcgctgctgccctatcagggcgattggaaaatgcaggatctgcacagggctgctctggcgtatgcatatccactggcagcttaccctgtggcttccgatcagaagggagtctggcggaaggagatcgcttttctgcaagtgaaagggagcgaaaatgtgttgctcagtgcgttatacccggaaggtgattcaataatagtccgtgtatatgaggtggagggaaaggacggttctgttatgatctcgtccccctttgccaccgtagaggaggaagtcaacctgttgggtgaaccaatgggggattatcgggatgcttttccgataaaggcccacaaaattcatagttttcggatgaggaagggaggcgattcctgtggctgaccctttccgtttagatgggaaaacgattatgattaccggtgccagcagaggaattggcagagcagttgcggaatcctttgcaaggcagggcgcaaagctattgcttaccgctcgacaggaggacacgctacgccacaccgctgaagagttacacgcgctgggtgcggcatgcaaatattttgcggcagatctaagtcagatggaggcggtgcgagagctggttacatggatgcaggcgcaagaggcgatagactgctatgtgaataacgcagcttttacagtgctctcctatcccatggagacgccgccgcacaacatggaagctctgtttcacaccaactatcgcgcctctgtgctgctggcgcaggccgcagcgcggcgcatgctggatcaggaaatagagggaagcctactgttcatcacctcgatcaacgcgctttccgcgctgcccagtcaggcggcctattccagcacgaaggctgccttggagtcgatggcgcggtcttttgccgccgagcttgcgccccacggcattcgggtgaacacgctggcacctggagcgatcctaacagatatgaacgcccattttaccccggaaaaaattgcggagcttagctccaagattcctttggggcgtatcggagccccgggagatattggagatgcggcggttttcctgtgttcggatgcagcccgctatattaccggcactactttggtggcagacggaggatatctgctacgaagatgaggaggagtgtgctatgaagctcgcaatggcttatttttatcccggccatgaacagaaaatacaacttgcacaacagatgggggtcgaccgggccgtcgtcaatgtgtgtatccagaaaacgcccatgccggaggagggaagatggaatttcacacctttccgggacaaagtgaaggctcttttggaagcaggtatcaaacctgaggtggtggaaggcccgacgccactcgagagaacaaagctgggactgcccgggcgagacacggagatctcagcgttttgtgagttgttggaagtaatggacgcactggatatccgcacggtttgctataactggatgccggtgatcggttggttccgctcccgaacagatatccccacccggggcggcgctaccgttaccggatactgccatcgggatatggaagatgcaccgcttacagcgtacgggagagtttcggcagaccggctttgggagaacctgaaatactttttgaaagctgtggtgccgcatgccgagcggcacggtatccgccttgctgtccatccggacgacccgccggtgaagatgatccggggtatagatcgtattttgatttcgcctgactccctgcaaaaggtggtggagatggtgcccagcgattacagcgggatcaccctgtgtcaggggtcggtcagcgcttccggggtgagtgtgactgagacaatcgaacgctttgcccggcaaaataagattttctttgcgcattttcgagatattcgcggtacggcagaaaattttcaggagactttccacgataatgggcaaagcgacatgtaccgttgcatgaagctctattataaatacggactggactgctgcatccgtcccgatcatgtgccgacgatgccagacgagatttgcagccaaccgggatattccgtgttggggaatctttttgctgtcggttacatgaaagggttgatggaagcggcgaaaaaagagacgggaggaaattgaaatgacgctggaagaaatggaaaaatacagggggatgctgatgcaggcgtattctgcggatctttacgatgtgttggacaaaatggggtattcgaaccaatgtctggatttgggtatttccccgctgaatccgttgtggaagatcgccggaccggctttcacgatctggggcatccgagagcctcgctttgatgcagcgttgccccgcccggattttgatgatcatgcgctgtttaaccggatttatccggggtgtgttgtggttatcaatgccgaaaaggatcaggtcgtgggacactggggagagatgatgagttacggagcgcgggctgctggcgcagtgggtgcggtcatcgatggtggcacccgtgataaaccgggaatccttcaaatagaaaactggacctgctttgcgcgctatacctcgccgattgagtccaaaagccgatggcgtccccgggaaacgcagatcccaatttacatgactggcagcttgacccagtcggtgttggtgcgccccggagactggctgttcggcgatgtggatggtgtgcttgtcatccccgaagagattctgggggaggcggcgacacgggtgtgcgagttggcccggctggaacggctttctcgtaccgccttccgggagggtgcttcctttcgagaggtctatgaaaagtataggcgcgcgtaagcgtttatctgcacagcgataaaggccggccggcttgaaataagactttctgcacacgggtggttgcagttttatagaaaaaaggaagcaaatgagttgtttttaacatcgttcggcgcgaagcgtccactagatgcagagctgatctgtgaatttcagaagaaactgacgcagaacacctgcgatactcgtcgataccagctcggtgaatggccgggcacctattaagctgcacgactacgtgacaggcagggaagagactggcgcagcggcagaggatgtaggggaagagatggacgagcttctcaaagaggtttcagagattgcagataaagatgctctgacagctgttgcgtatttccatgcgaagtttgagaatatccacccgtttgtggatggaaacggcaggactggccgccttgcgatgaattatttccttattcagcacaaccatccgccgatcatcatccacgaggaggatcgcagagcgtgctacgaagtgcgggacagcgttcaggatctggaacccctccgggacttcctacgttgcgaaatgaaaaagacgtgggaaaagcagattgtcagggcagagcgatgctgggaaaggaaacagtcgctgaatttctagcttgtactttgaaaggaagctgcaaatatgtaaaagatcaatttaaatattggaagctgctctggaaatataaatttctcaataaataccgtgaatgtttatcacgctgagttgaaaatataataaatttcggacggcagcggttcgacacctagaaacatagtattaaagggaattactcaatcaggtgagtagttctctttttttcaaccctgcaaaaagcgaagatgaaatgcggttgtactgaataagagaatttcccgaagctatgcttggaagtatatcaaaaaccgactgaatttgtgcttgtctgttacaatttgagtcaagaaaatattttcctaatctatttttctggaggaatcataatggaaaagcaaatgaaaatcggaatatggctggacgtatggttcgagacatacgcaaagccggtgtacgcatcaaacacgctgaggctgtacatggatgtacgggagaggatgtaaaaaagcagcccgagtattgaagaatgggagttggaggatcttctgccagtgcattttcaaacggtgatgaatcgcatggcagagcgatataccaagccaacgatcagccatattaggacgttgtataataagatgtatgaaaaagccatcgacaacggcttgtgcacagaaaacccgattataaaaacagagctgccgaagaatgcttctgtaaggacagttatggccatgacaaaagaggaacaggaagcatttattcaggcatccaaaacactttctatgagagatcagtttattttaatgacgtatctgcttacaggattgcggcgcggagaattgaaaaacttgctgtggagcgattatgacagaaataggaaaatcctttttattcgtcgaagtaaaacggcaagcggtgtgcgagaggttccggttattctagaagtagcgttaatgctggcacacttgtggggttgggaaagaggcaaaaaggatcagaatacgtatatttttggaggaaaggagccactgaatgtaaatcatctgcgctatatctgtgaaaagactgcgaagctggctggaattccgagggtgttcccgcacagacttagacacagctttgcaacccgcctgattgaagctggaggagaagctaaaagccagtcgcttattaccggccatcgtgatgtcacgtttactttaaagcgttatgtgcatccagaccccgcacagcttcatagtcagatgatgcttttgtcgcaggtaaaaagcaaagcagtaaatattgaataaatgcaaaaagcccgagttctgaaaagaactcaggctttcatgcgaaatagacggacgaaaatgaataaaatatgtcaaacatcttgacacaacacagaaagaagaataccttacatataaggattcccctttaagcagaatccaactggccttttctgaagcaaccaacttcagcgcggcctgctcaggtgatacagacactatcacagaagcatttgagaactctgaatatctcagatgtccttatgcgtaattataacacatctgcgtttaagacccggtagcagcctctattgcttgaaccgaaatggttagcagcggcgctcaaccggaggaaaaggtaacctgtgctgcgtgcaaacgatatacgcttgcaaacgcaagtttaaatatcgatcaatggtaatagctcaagctgttatcattgaccaatgtcctcaagatcattgagcatattggtcaatgataacggggaaaccccattatcaccgatttatgatggtggaaacgcgcgggctcgaaccgcggacctcctgcgtgtgaagcaggcactctaaccagctgagctacgcttccaaatgacctgtttattttatcacacttttttccgtttgtaaagatataaacagaaattttttgagaaacggatttttcggcgcggcttatgcgggggcggcgctttttcgacaccttatttttggtcattatgatacgattaaactccggaaaaatcgattacaaccaattttttacagaaacattatcggaaatacacaaagcgggaatgaaaatcatggattattattagaaaatagctaaaaacccttgcacttttttcttgttgtggtattatatgtacagaaagcgatgcgcggatttggttccgcatgtggattgtgccgcaaaacacgtgaaaatgtgctttttgcgggaaaaagtgaaggcggggagcgggccgtgcggcggcagagtgcagtgaaggcagaggcgtaatgtgcttcccgcgtgaacttcaaacggaaaggatgatctcaagaatgagcgaaaaaaattctgcgagagcacaggagggcaatgtgccgctctatttgttccgaagcggcaaaaacagccatgcctatgaatatatgggcgtgcacagcaccgtgcgggacggcagggcctgcaccgtctgccgcgtctgggcgccgaatgcgcaggccgttgcgatcaccggcgagttctgcggctgggacccgaagcgctatccgctggaaaagattgacgacgcggtttgggagggctatacggacgagccgctcgagccgtatacggcgtataagctggcggttaccgacgcggccggcaagacggttctgaaatgtgacccgtatgcgttccacgcggagacgcggccgggcacggcctcgcgcttttacgatatttccggctacgaatggaaagacggtgcgtggttcgactacaagcggaaaaaaccgcactacaaccagccggtcaatatctatgagatgcacgccggctcgtggcgcaagtatgcggacggctccgtgttctcctatgagaagctgggcgacgagctgattccctatgtgaaagatatgggctttacgcacattgagctgatgccgctgacggagtacccgttcgacgcgtcctggggctatcaggtcacgggctatttcgccccgacttcccgctacggcacgccgaaggactttatgcgctttgtcgaccgctgccatcaggcgggcatcggcgttatcatggactgggttccggcacacttcccgcgcgacgaggccggcctcgcgaagttcgacggcggcccgtgctacgaatatgccgacccgaaaaagggcgagcacaaggagtggggcacgctggtgttcgactacggccgcacggaggttgtcagtttcctcacctcgagcgcgctgttctgggtcaaagaataccacatcgacggcctgcgcgtggacgcggtcgcctcgatgctctatctcgattacaaccgccgcgacggcgagtggatcgcaaataaaaacggcggcaaggaaaatctcgaggccgtcgcgtttttgcagcggctgaacgaggccgttttcgccgaagcgccggaggtcatgatgatcgcggaggaaagcaccgcgtggccgatggtcacgaagccgacctacatgggcggcctcggcttcaattataagtggaacatgggctggatgaacgacatgctgcgctatatgtcgctggatccgctgttccgcaagggcaaccacaacagcctgactttctccttcttctatgcgttttccgagaactacatcctgccgatctcgcacgacgaggtcgtgtacggcaagggctctctctacaataaaatgcccggcacgccggagcagaaggccgcgggcgtgcgctgctttgcgacgtatatgatggcgcacccgggcaaaaagctgcaattcatgggcacggaattctcgcagcacgacgagtggaatttcaacgaggagctggagtggggcctcctgcagcacaaggagcaccggcaggcgcaggaattcttccgggcgctcaacgcgttttacatcagccgcgccgagctttgggaggtcgatttctcgtgggagggcttctcatggatctccaacgacgacgacagccagagcgttatcgcattccgccggttcgacaagaagggcaacgagctgatcgccgtgtgcaacttcctgccggttcagcgcacaaattactgcatcggcgttccgtttgccggtgtttatgaggaggtcttttcctccgatgccgtggagttcggcggcggcggcgtgacaaacggcagagacatccgcaccattcaggagccaatgcacggtttcgagcagcaggtttcgctcaccttaccggaaaacacggtctttttcctgcgctgcaagcgcaagacgccgaagaaaacggcggtgaaaaagacgatgcgccgcggcaaggccacgggcaaagcaaaatcctgattttcgcaaactgatagcataatagagtacattacaatcagaaaggggtcatcagtcatgttacctaagcaagaagtagtcgccatgctgctggcgggcggccgcggaagccgtcttggggttctcacaaagaatctcgcaaagcccgcagtgccgttcggagggaaataccgcatcatcgatttcccgctctccaactgcgtgaactccggtatcgagaccgtcggcgtcctcacgcagtatcagccgcttgagctcaacgagtatatcggctccggccagccgtgggatctcgacagcatgaatgccggcgtacatattctccagccgtacgagcagagcagcggctctgactggtacaagggtacggcgaacgccatttaccagaatattccgtttatcgaccgctacaatcccgattatgtcgtcgtcctttccggcgaccacatctataagatggactactcgaagatgatcgcgttccacaaggagcaggatgcggcatgcacgatcgccgtgtacgaggttccgatggaggaggcgccgcgcttcggcattctgaatacgaaccccgacggctcgatctatgagttcgacgagaagccggcggtgccgaagagcaacaaggcctcgatgggtatctacgtctttacgtggagcaagctgcgcgattacctgatcgccgacgaaaaggacccgagttcctcgaatgatttcggcaagaatgtgctgcccacgatgctgaatgcgggcgagcgcatgtttgcgtaccgcttcgagggctactggaaggacgttggcacgatcgacagcctgtgggagtccaacatggacatgctgcacccgaaggccggactcgacctttcccgcgaggattggaagatctattcgagaaacccggttgtgccgccgcagtacatcgcaaagggcgcgaaggtgcagaactccctcgtcgccgagggctgcaacgtgtacggcgatctcgaattttccatcctctttgagggcgtctacgttgcgccgggcgccgaggtgctcgactccatcgtcatgccgggcgctgtgatcgaggagggcgcgaaggtgcggtacgccatcgttgcggaaaacgccgtcgtcggcaagaacgccgtcatcggcatgcgtcccgaggacatggagaagcgcgaggactggggcgtcgccgtcgtcggtccagactgcaagattccggagggcgcggtcgttgcgccgaaggaaatgatcgaagctgaggaggtgcaggcgtaatgctgggcaataatgtgttgggcattctttttgcttatgttcacgaggagcgcgtcagagatctgacggagatgcgtgtgatggcgtccgtcccgtacggtggccgttaccgcctcgtcgatttcgcgctttcgaatatggttaattccggcctcaataaggtcggcatcatcacagaggcaaactatcagtctttgatggatcacctcggctccggcaaggcgtgggacctctcgagaaagcgcgagggcctctacctgctgccgccgttcggcaaaacgatgtcgagaacggacggcaaaatcgaatcgctcgattcgatccgccggttcctgaaaaattcccttgaggaatacgtgctgctttccgactgcgatacggtgtgcaacatcgactaccgtgaggcgatcagccagcacatccgcaccgaggcggatatcacggtgatctaccgccacggcgattcgccggatgtcgagcgcaacacggtttatacgcttgaccccgccggccgcatccgtgaaatgctgatccaccgcggcagcgagcgcgacgtcaactacggcatgggcatgtatattgtcggccgcgaaaagctcctcgagctcgtcgagggctgcatgagccgcaatgaatacgatctcgaccgcgacctgatgcgcgcggtccacgagctcaaggtgatgggctttgaattcacgggcacggcctatcagatcacctcgttcgaggcgtattttgaagccaatatggcgctgatggagccgaagatccgcgcggagctcttcaactcgaaccgcccgatctacacgaaggtgcgcgacgacatgccggcgaagtacggcctgaattcgagcgtttccaattcgctgatcgcggacggctgcgtgatcgacggcgaggttgaaaactgcgttctgttccgcggcgtgaagatcggcaagggcgcgaaggtgcgcaactgcgtcatcatgcaggattcgatcatcggcgaaaacagccgcctcgattacgtcgtggcggataaaaacgtcgaggttgaggcgaaccgcacgctgatgggctaccagacgtacccggtgttcatcgcaaaagaaagcaaggtctgacgatacgcccctttttgcgcggcggagccccggacgggccgcagccgcgcaaaaagggctgagtggagggttttccacaagcagagaaggattggtgaattttatgaaagtattgttctgctccagtgaggcgctgccctttgcggcgacaggcggccttgcagacgttgccggctccctgccgcaggcgctccgcacgcgtctgatcggctgccgcgtcgtcatgccgctttacgagagcgttccgcaggagctgcgtgagaaaatgaaattcctcaccagcatcagcgtgccggtggcgtggcgccgccagtattgcggcatctttgaggcgaaggtcggcaatgtgatctactatctcatcgacaaccagtattacttcaagcgtcaggggctttacggccacttcgacgacgccgagcgctttgctttcttctcccgcgccgtgctcgagatgctgccgtacatcgaatttaagcccgacattatccacgtgaacgactggcagacggcgctggtgccgatctactaccgcctgttctacgcgaacaacgactggtacagcggcatcaaaacgctgttcacgatccacaacattcagtatcaggggcagtatggctttgagatcctcgaggatgttttcggcatccccaagacggagagcagcctgctcgagtacaacaaatgcgtcaacctgatgaagggcgcgatcgaaagcgcgaactgggtctccacggtgagcccgacgtatgcgaaggagattctcgacccgtggttcgcgcataagctcgaccccatcctgcgcgagcgcgcgtggaaactctccggcattctgaacggcatcgatacggtcggctatgatccttccaccgaccagagcctctacgagcactacgatgtggagaacatggcgggcaaggcggtcaataaggcgaagctgcaggagcgcctgtatctggaggtcgatccgaacgtgccgatgatcggcatggtcacgcgcctcgtctcccacaagggcctcgacctcgtcaagggcgctgtggacaatattatgacgtacacgaacgcgcagtttgccgtgctcggcagcggcgactgggagtacgagcagttcttcaaggagatgcaggcgaaatacccgggccgcttcgtgctctgcctcggctttgtgccggagctcgcgcggaaaatttacgccggctccgatattttcctgatgcccagcaagagcgagccctgcggcctttcgcagatggtcgcgctgcgctacggctcgattccggtggtgcgcgagacgggcggcctcaaggattccatcacagacagcggcgacggcaagggcaatggcttcacgttccaagcgtatgacacgcaggatatgctcaactcggtgcaccgcgcgatctatgcgtacaacgagagcaaggacggctggcaggtgctcgtcaagcgcgcgatggagtgcgacaacagctgggggcgctcggcaaacgagtacatccggctttacaagcagcttatcaacagctgattcggaccgaaaaaatggcgggcgggattttcccgcccgttttgcgtgataggaaaatttaacgccggagaggaagccgctcatgcggccgtttccggcagattgggggacaatcgtgagcacaatcgcacaggcggacggcctattgatccgcaggatggaggattcttcggcggattttgagcaggtgctccgctggatgaccgacccggagaccatgcgcttttgggagggtatgacagagcattacgacatcgcgcgcgtcgaggcggaataccgggggcacgatgcggagaacacgacgccgtgtatcgtcgagctcggtgggcacgcggtcggctatatgcagtttgcaccgatcggcacggcggcggattacgagatccccgaagcggagtgggagaaaatcgtgcggccgggcgaagcggcctacggcatcgatatgtacatcggcgaggtcggctgccgagaccgcggcctcggcacgcggatgctgaatctgcttgtttcggcgcttttctcgtcgtacggcgccgacgtgctgctgatcgacccgaaaacgcacaacacccgcgcgatcgcctgctaccgcaagtgcggctttcgcgactgctgcgtggtgccgcagcgcgagaagcaggacggcgtcctgcacgacagcctgattatggtgcggcgcgcctgatctatccggcggggaaccgtgcggtaaaatcgcggctcggcatgaacggaatccaaaatacccgcaataaagcccgcccgacacagcttttcaactgttccgggcgggcttgttcttttatgctcaaggctttgcggcacgctttttgcagtgccggtaaacgagcaggcagacggcgctgccgagcacgacgagcgcgaggatcaggagcgcgcagtgcatgaaaaaggcgtcgggcagaatcgtgatgaccgggtcggttgcagggtcgaagatccagtagttgttgttgaagacgatccggtggaacaggacgaacaccgtctgccagttcagcgcgatcagaatgccgagtaccgcggggagcgcgacggtcaaaatgccggtcagcagcagataacccgggtttttgcggaagtgccggtacacgatgccggcggccgaaagcaggccggaaacgagcgcgagcagctcgaaaaatacaaagacgttcttgacctcctcgaagtggatgcgcccggtctcgctcatggcaagcgtcgggaattcgagcgtctgcgggccgaaaagcgagttgtagtcgatcagcacgttgtagttggcgaggatctcgtccttcggcagcccggacgatgccgggatgttcagcaggtcgacgtccagatagtagagtgggcggaaattcagcgtgacgacgacggccgccgcgatgatgaacagcgtgagcgcgagtgcgagcacgagattcagaggggaaaacagctttttcatgggatgcctttctgtggagaatgcaaaaattgcgccggtgcgcctgcgcatatgcggggcgcgcggcgccggtctgccattattatagcgcagacgcgggaacggcgcaacaaaatgcgggaaaattcaggccgggtcggggattctggagacgaaatagtgcatgttctcgcgcagcttccggctggccgcgttcagaagggcggccgcgtcgatcaggcagcacggcgcttcgccgaagctgccgcagcggagcacatccggcccgagaatgtcccggatgcgcgggtattcctgctgccagccgcgaaagtcgtggccgtacagcatgcgcggcgcgccgtccacgatgtagcggatcttttcgcgggtcagcacgtagtccgtgccgacgcgctcctccacgccgtgcatgaacgtgcaggcgtggagaatatcgccgatgaaaagcagcttgccgccgcaggcgggcagctgcatgagcggcgcgtgcgggccgaccggcgtttcgtccagcgcgtggtcctttgtcaggcggacggcgtccgcgcccagcgcgcagaccgaatgcgtggggtggatgctgcgcacgacgccgggcatgcggaaaaaggtgcgcggcagcaggccgacgcacggctcgctctcccggctgtcgaacacgggggtctccggcgtgacggtctcgtatgtgaaggccggcagcagcagtgtgccgccggggcaaacggcttcgtagagcgtttccagcacggcttcgggcgggagcggcgtcccgattgctttcatcgatgaatggacgaacagcacgtcgcccggagatatgccgagcgcacgaagctgcccgcgcatggtttcctgtgtcatggtggggtgcacttccttttcaaaaatcctgtgtcttttcaagataccacaccgcgcacgcaaaatcgaccggcaaagcgccgaaatttccgcggtttttttggtcgggattccgggcaaaactcacgcgcagccgggtttcaggctgcgcgtgagtttttacgggacgagcacatcggtaatttcggcgatgtacatctcgtggtagtccttttcggggtaaaattttccgtcgatcgccccgtcgatgaaatccgaggccggaagcggcgtgcggctcagcttgcggcagacgagcacgagctcggcctcctcgaaataaacggaaccgttcgcgaaaaccggcgtcaggccggatttttccaccttgttctcactgcggcccgagaccttgccgagatacccgagcgtatttttcagtgctgccgggtagaacgaaagcgtgaaggtatcgccgctgtcgagaaattccttcgtgtagcgctgcgggcggatgtagacggtcacggtcggcctgttccagatgtagccgagcgcgccccaggagacggtcatcgtgttgaagccggatgcgtcgccggccgtcacgagggcccaatcctgcccgagctttgtgaacgggttcaatgaaagcgaatcataggggacagagtgaagagccataaaaaccaccgagcctttctgctgaataaattgcctgcattcagtatagcacgtttgaagcggggtttcaagccgcgcgcttcggcgccgggccgcgccggatgacgcgcttgatcgtaaggagatagacggtgagcgaaatgagcggcgggaagatgtcggaaatcgcctcgcaccagaaaatattctcgatcgggaaaaagaccggcagaataaagatgcaggcgaaaaagacgatcttgcggaaaaccgagagcggcagcgcgattttcaccatgcccatgccggtgaagccgtccacgatcgcgtactgaatcgcgagcgtgatcgtgccgagcgtgtagatgcggatcagccgcgccgtcatatcaatgtattcgggattctgcgtgaaaatgcgcgcgaaaacctgcgggataaattgggcggcgaggaacatgaccgcgcagaatgcggcggccatcaggaagatgatccgctgcgcctttagaatcttatccggccttcgcgcgccgagattgtagccgagaattgtctgcgtgcccatcgtcaggccgccgagcggcatcgtgatcaaaagctcgaagctctgcacgatcgtgttgcaggtcagcagcatatcgccgtagccctcgccgccgcggctctgcagcatcatgttgagggagatcagcatcacgttgtcgaagaggatgatgaggaacgagctcatgccgatcattgtgacgcgcccgatgatcttgaggtcgtagccgccgaaggtgatcggcacgatgacattgccgctgagcaggaaccagagcacataggcgcagcttgcgatctgcgagatgaccgtggcgatcgcggcgccggcgacgcccatatcaaagacgaagatgaaaatcgggtctaggatgatgtttgcgaccgcgccgatcagaacggagagcatgccgtttttgctgaagccctgcgtgatgatgaactggttcatacccgtcgcgatcagtgcaaagaccgtgccgagcaggtagatcgaaaagtacgattcggcgtaggggtacagcgcctcggaggcgccgaaggtgatgaggatcgggcggcggaagatgaaggccagaatcgtgacgagcacggagagcgcgaggagaaagacgaagcagtttgccacgacctttttcgcgtcgcgaaccttgccctcgccgagcttgatgctcacgagcggcgagccgccgatgccgacgagaaaggcgaacgacgaaatcagcgtgacgatcggcccgcatacgccgacgcccgcgagcgccgtttcgccatagccggggatattgccgatgtacatgcggtccacaatgctgtacaaaacgctgacgagctgcgagagcatggaggggatggcgagcgaccatacaaggcccttgatgttgtccgagctgagatcggtgatgagtctcattttaaatcacgttccttactgcgcggggaatgctgcgctggggtattttgccgggcgctgttttcgcggcggtccggatgccgcggggatttctgtcagaatgaccggcagatctggaagatgtagaacttcaggtagtacgattcgtcggcgctccagaggatcgggtgatccggcgcctgcgtgcggaactccacctgccgaaggcggcagtgcgcggcgcgcgcggcctgaccgatcgtctgtgcgaagagctcggcgttcatgtagtgcgagcaggagcaggtggcgaggaagccgccgtcgcgcacgagcttcatgccacgcaggttgatttcgcggtagcctttcacggcgttttttacggagcttttcgacttcgtgaaggcaggcgggtcgaggatcacaacgtcgtactgctttccctcgctttcgagcgtggggagcaggtcgaaaacatcggcgcagcggaattcgacggtgccggagaggccgttcagcgccgcgtttttcgcggcctgcgcgaccgcgaggtcggaagcgtccacgccgagcacgtgccttgcgcccgcaatgccggcgttcagcgcgaaggagccggtatgcgtgaagcagtcgagcacctcggcgccccggcagagccgctggatcgcgaggcggttgtacttctggtcgaggaagaagccggttttctggccgtccttgacgtcgacgatgtagcgcacgccgttctcggtgatctcgacgtcggtgtcaaattccgggccgatgaagcccttcacgcggtccatgccctccttgaggcgctccttcgcgtcgctgcgttcgtacacgccgcggatctcgacgctgtcctcggcgagcacctttttgagcagctcgacgatgcgcagcttcatcttgtcgatgccgagcgcgagcgattcgacgacgagcacgtcggaaaatttatcgacgacgaggccgggcaggaaatccgcctcgccgaagatcacgcggcaggcggcggtatccacggttcttttgcggtattcccacgcggcgcgcacgcgcctttcgagaaacgcgtcgtcgatttcctgcgcgctgccgcgcgtcagcatgcggatgcggatcttcgaattctggttgatgaagccgcggccgagcgggtagccgttcgcgtcctgcacggagacgactgcgccgtttttgaacgtgccctgaattgcggcgatctcgttgtcgtagatccagagcccgccggccttgaagctgcggccctcgccgggcttcagcgttacgatcgtgttgttttccattctgatttcctttccggttctgtttctatatccgctttaaagccgccgcggctccacagccaaagcggcgtgtgcagatcggtcggcagcaggcccgagccttcgagaagcgccgaccagcgggcggcggcaagcgcttgcgcatcgccgcggctgcgctcttcctccgtgagcacgccgagccgcacgcttgattgcagaacgtgcgtatccggcgcgatcgagatgttttcccggtcggaaaagcggcagtcggtataggcttcgagcacgtgcagccagtaattgcagattttgatgccgccgagataggggaagtctttcttgtgcgccgcgatatgcgccttaatctcggatacgcggaaatggttctgcgcgagaaagacccgcaggtcgccgccgaactgctccgcaatcgtgcggcagagtgttttccagatggcggggtgtcggttcggctgcagggcgaccctgtactgcaccagaatacggcgcagcgtttcttcgtccgtctgcatgacgcggacaggatcgaacagcgcccgtccggcggggtcggcatacatccggttggcgcactcccacagtcggtaggaattgcgctggtaattgagcgccattggcagcgtaaaatacaggtagttttcgccggaggcggggtcgaggtgcgggttttcgtcttcaggcatcgcctcgccgcccagtcgcccggctttataggccgcaagcaggcggtgcacctgctctagtacagcgtttcggtcgttcatatggtattttcctttcttcccgtgcggatctcgccgagaacgcgccggcagaacgcggcgaccagtttgccgtccggctcaaagatgccgccggtccggtaggcttccaaagctccgcgcagcagcggcgcatattggggctccagatgcgaaagcccccacgcgccgccctcggccttcgagagcacgcgtttttcccgcacggcggcgagcacgcggcacaggttcaaaagcacgtagaccgggtcgctctgcacagcggtttcagcgtctgcaatgtcggcgcagatgctgtcgaggtaattctcccacgggacggcgccgaaaatgcttgacaccggcgggccgcacagcgcgattcccttgtgccggagcaccgtgaagtgcgccgcgaggtcggggtccgtgccgcgcatcgccgcggcaaagccgcttgggtcgcgcgcgtaggcgctgcggtgcgcgtttgaaaagtgcagctcaaacggcgtggggtagacaaaatcccggcagtattgcagcagcacggcgctcatttcaaggccctttgccggcgcctcccggttcagccggtatatggcctcgagcagccggaggcgggtatcgggcgcgagcgactcccgaacggccgcgatatagtcgacgtcgctcttctgcgggttgaagcagccgaacgcgatcgacccgtgcaggtagaggccgacgaggttttcaccgaggatctccatgtgcgtgcgccgtatttcatggagaaggcgtgcgatttgcggcgcgctcatcccggctcccccttcggctttttggcggcacgccttgcacgcaccttcggcgcggtgcgcgcaaagctctcggcgagcagcgcccaaagctcttcggcgccgaccgagccatccagcgcgatgctgacccagtgttccttgttcatgtggtaggcggggaagaagcccgggcggctgtgcagcatgccgctgagcagtgggtcgcatttcaggttcacgatgtcgagcgcatccgttccggaaagcccgagcttgtcccgcggcacgtccatgacaagcgcgaaccacttctggtttgtgggatggcgcagcacggcgtaccccggttcgtccggccacggatattccggttctatcccaaaatactcgcgtacatgggcgaaaaattcagttcgattcatggcggtgccctcttttctccggtttgacataggatatatagatgacgcgtattgcgccggtgagatggtgtggctgcatcggcaagccatgcacgaaatgacgtgatgagcagattgtgcatcggcggacaaggtcatccgatgggataaaagcacaggctgtttatcttgaggccagaaactgcgcctttgttatgccgaagagcctgctatcctgaaacccagaattacagaaataatagtctttggctagtccttctaggcacaggccggctttttctaaaactctgccggaagcgacattgtttacggaatgagaggcctccactctgttgagtccgacctctaaaaacatatatgctaaaacagccttcacggattctgtagcgtatccgttcgaccagaattctcttgcgagacagtatcctaaaacggctttttggtcatattcatttatatttacgacactcacagagcctatgagctttccattggtttcaatgccccattgatatgtgcggtcggacttgtagtagtcgaatacttctataatatacccgcgggaatagtcgacgcttgggtgcgggcgccaacgctcgtatttacatacttcgggatcgctcatccatacatataccatctcggcatcctcgggcagaatcttcctgagaagcagacgttctgtttttatttgctgtgtgcctttgtgatttatcatgagattgatttcctttccagccgaatacagctttttaaagcacggcatctttatagattgccttttgcagataaggagatcacacattctacatgcgcggtgccggggaacatatcgacgggggcggcggcgtcggttttgtagccgctttcgccgaacagtttcaggtcgcgcgcgagcgtggccgggtcgcacgagacgtagacgacgcgcttcgggcgcatcgccgcgatcgtcgcgatcagggcactgtcgcagcccttgcgcggcggatcgatcacgatgacgtccggcttttcgccgcgctcgaacaggatctttgcagcctcggccgcatcggcgcagaggaattccgcgttttggacggcgttgcgctcggcgttgcgccgcgcattttcgacggcggccggcacgatctccgcgccgatgatctttttcgcgtcttttgccatagaaaggccgatcgtgcccgtgccgcagtagaggtcgagcagcgtttccgagccggtcagcgccgcgtattcggcggccttgccgtagaggcgctcggcctgcgtgcggttcacctgataaaaggcgtgcggcgcgatctcgaattcgaggccgcagagcgtgtcggtgatcgcggccttgccccagagcatgcggctgtttttcccgagcacgacgttcgttttctcgcggttaatgttgagcagcacgccggtgagctccggcacggccgcgcgcagcagctcgacgagcagcgcctcctcgtgcagcgcggcgccgtttatgacgacgcagaccaccatctcgccgctcttttcgccgcggcgcatgtacaggtgccgcagcacgccgctgtgcgctgcctcgtcgtagacactttcgccggaggccgcatgccatctgcggaacgcggccgcggcgcggtcgaacgcttcgggctgtaagaggcagctttgcgtgtccacgatgcggtgagaattgacggcgtaaaagccgagctgcaaggcgccgtccttggaaaggccgatgggaagctggcacttgttgcggtagcggcagcggtccggcgcggcgaggatcggctcgagcttaaaatcccgcaggccgccgatgcgctcgagcgcgtcgcgcacgcgctgctctttgatctgaagctccgcttcgtagcggatgtgccggtacacacagccgccgcactgcgcggagacggggcagtccggcgcgatgcggtcgggcgacggctgaagcagcttttcaagccggccgaaggcgtacttcttcaaaaccttgacggcgcgcacggtgcagcggtcgccgatggcggtgcccggcacaaagacggccatcccctccgcgcggcagatgccgctgccctcggcggttatagccgtgatttcggcctcgaaaatatcgtttttcctgatcatgtaaaaacctccggtgaaacattcggcttgaaggggcgggaaacgcagggttcatcgacgaaatatttttggttttacaaccggtgtgatgtttcacgcgcctgaaatgtgcaaaaactatggtgaatatgtatatttttatggggtaaactttgtgtgagacaggcaaaaggtagattgtctaaaaaaatattgacaatcgatattccggtcgctataataaaggcgtagtcaatgattacgagctctgcggtaaggatttaccgcgacttttcaatacaactcctccccaaaagagagcaaaaggcgagattttttctcgccttttgctcttttctgcggaaaagcgaaaaggcgggggaaatacgcggccgcacacatcaggagacgacgttgaccgggcgcccggcgaggtaggcgcgcaggttcgcggcgaccgtgtcgatcagccgcaggcgggcctcgcgggaggaccacgcgatgtgcggcgtgatcaggcagtttttcgcggtgagcagcgggtggccgggctgcggcggctcctgggcgagtacgtcgagcccggcgccggccagccgtccggcgttcagcgcgtcggcaagggcggcctcgtccacgagtgcgccccgcgcggtattgaggagcagagcggtgggcttcatgcgcgcgaggacgtcagcgctgacgatgccgcgcgtctcgtcgttcagggggcagtggagagaaacgacgtcgctctccgcaaaaagcgtttcgaagccgcaccatgtgcaccccggcggcagtgtgcgccgcgtgcggctgtgcacgaggacacgcatgccgagcgccgcggcgatccgcgcaacggcgctgcctatgctgccgaagccgagcacgccgagcgttttgccggtcagctcgagcaccggaagggcggtgtgcgccgtttccaccgcgtcgctccagccgccggcgcgcgtcatattgctgaggcgctcgacgcggcagcacagggcgagcagcagcgagatcgtgaactgcgcgacggtttcggcgcagtacagcggcacattgcagacagtgacgcccctttcgcgcgcggcccgcacgtcgatcgtgttgaaaccggttgcgagcgtgccgatgtagcgcagccgcggcagcgcctccaaaacggtgcggctcagcaccgcgcggttcacgatgacggcctccgcgtcctttgcgcgctccgcaaggcgctccgccggcgtatcgccgtatacggtgacgctgccgagcgcctcgagcggtgcccaagaaatatcgccggggttcgtcgttccgccgtccaaaaccacaatattcacagccgcagccctcctgcccgcatagcttaaaatccaattatacagtataccgtatccggcccggagtttcaatggcaaatttctttgtgcgaacggattttcgggtaacaggaaaacgtagatctctatgcagaatagagatctacgcttcgaggaggacgtacattaagttccaaaacaattgatcgtgaagttaacggatacatcttcagcagaatccatctgctttacagagagtgtgaaatagccgccgggcgaaatcttgcaaatgacattatcttgctctgcatcttcactgacacacagaacatcttcaaaaaggtgctggcggttgccgttgatgtcatatgaaatcaaagtgtaaagcatctgtgctccagttggggaatttaaatctaaccgaacaaaactgtatgaatcagcttcgaatcgttcacttccctcaaaagaaacgtcttgatatgtatttttaagagtcagatccaccactttagcagatgattttccgttagctgtcgcaagttggcatcctgcaagaatacaaaaaatcaaggagaaaagaaagataccaaaaagtcttttactcatagccgcattaagacctctattaaagtgatatttttgtatcatattgaaatgtccgataataccaaagtgaaaattcaataatagaataatttcaagattaaaagttgaaactttgtgtattttgtaactataatgtacaacaaaatcagaaaaatgtcaacaaataaattgagaaatcaagtgccggtgttttgtgcgctacgctaaatttcgggcgttaaatgtcatccaatatttaaagaaaaatagtttgattataggttgctgcctaattataaatgtttacaagttcatttgatgagcgtataatcaaggcaaaccattcgatgtgcatggaggtgctgggcttgacgttttacgagctgctctggtattttgcgatatattcctttctcggctggtgcatggaggtcgtgttctgcacggtccgcaccggaaagctcgtcaaccgcggctttctgaacggccccgtgtgcccgatctacggcttcggcatggtgatcgtgctcgcggtgctcggccgcttttccgacaatatcgcgctgcttttcttcggcggcatggcgcttacaagcgcgctggaactggccggcggctgggcgctcaaacgtttttccacacgacgtggtgggattactcggataagccgatgaacctcggcggctacatctgcctgcaattcagcctcgcgtgggggctgtgcgtcgttttggcggtccgttttctgcaccgggcggtcgaggcgctcgtgcagtggcttccgtttccgctcggcatggtgctgatctgcattctcacggcgtattttgtcacggatgcggtcgtcacggtgctgaccatctgccgtatcaaccgcagccttgccgtgctgagcgacatggcggcgaagctgcgccgcgacagcgacgcgctctccggcggactcggccggctggccctgcacgcggacgagcagcttgcaaggcagcgggaaacgctctgtgagagggcgcaggatacgcgcgcggagctcgaggaaaaggcgcaggcgcagcgcggacgcttgcttgaaaagcaggccgcgtaccacgcggcgctggaggagaagcgcgtgcagatgcagggggcggcggagcgcctgcgcgccgagtggctttcccgcagcacgggcgtgcagcgccggatgcagcggcgtctgctcaaggcgtttccgcgcatgcgccacgagcgcgacggcgaggcgctgcgccgcgtgcgcgcgtggctggaggagaagcggcgatgaagctctatgcacggattgtaccgcaggcgctttccgcggccgccctgcacgacgcggcgtatgcgctgctctttgacgtactgcgggcagactggagtgttccgtcgccgcaggtggaaaaaacgccgctcggcaggccgtatctgcgcggcgccggccggccgttcatcagcctgagccacacgcgcggctttgtctgctgtgcggtttcgggaacgccggtcggcatcgactgcgagcgtcgccgccgggtgacggagggggcgatgcgccgtgtctgcacgcccgaggagctcgccgacatccgcgcggcggacgacccggcggcgcggttcctgcaatactggacgctgaaggagagcatttcgaaaaagcgcggtgtggggctttcggaatcctttcagcagtatgcgatccgcttcgagggggaaaagccgttttgccccgggcacaggctgcactttgaaatgcgcggcggcttctttctggccgccgcggaataaaccgttttccggctgcatacgtatgagcaaacgggaagagagccgccgagcgggctccggcctgcggcaaaggcgcgccagcctgcccggcagaccgtttcccggccacaaataagggccggcctccgctgcggcggaaccccagcgctccgcggccttgcagaaaggaagatggtttttcgtatggtattgtctgtcggcgccaataaaaagcgcattcttgcggtggtgcttctggttgcgatcgcggtgggggcgtttttcctgattccgcgcgagcccgagcgcgtcacctaccccggcatgacgaacgaggagcgcgtcgcgttcctttcgacattcggctggacggtggaggaggagcccgccgatttccgcgaggttgtgattcccgccgaattcaacgacgtgtacacggcgtacaacgccatgcagaacgcgcagggcttcgacatgaagccgtatgcgggtgagaagtgcatgcagtaccggtacatcgtgacgaattaccccgactgccccgacacggttttcgcgacgctcctcgtgtttgaggactgcatcatcggcggagacgtgtccacagaggcggcggacggcttcatgcacggctttgccgcagacagtgagccgttcatcgcgccgcaggccgaaggcgccgcgtaaaagcggcgcccctagataaaagaaagcgcgctatatctattagaaagcgatgttgaatccatgagacttgataaatttctggccaatgaaaatataggaagccgcaaggcggtcggcgcgctcgttcgcagcggcgccgtcaccgtgaacggacaagccgccaaaaaggcggaccagcagatcgacgcagacagcgaccgtatctgcgtgaacggcacgcccgtgcggtacaacgcgcacacctacatcatgctgcacaagcccgcgggcgttctgaccgcaacgcgcgacagccgcgccgaaacggtgctcgatctcctgccgcctgcgctcaggcggcgggggctgtttccggccgggcggctcgacaaggatacgaccggccttttgatcatcacggacgacggcggctatgcgcaccgcatgctcgcgccgaagagccatgtgatcaaacgctacgaggccgtgctcgacctgcccgccgaggcggcggacaaggcccgcttcgcggccggcattgagagcgggccggactgctttgcgcccgcactgcttgagatctcggaaacagacccgcataccgtgtgggtcgagatccgcgagggcaagttccatcaggtgaagcgcatgttcagggcgtgcggaaaaaccgtcacggcgctcaggcggctttcgatcggcgcgctgcggctggatgcggcgctcgggcccggcgaggcgcgtattttgccggaaaatgaggctatgctggtctttgtgaaagatgcggagcaaattagacgaaaagcgtagcgggagtttggcttttgtttattttgactaaacaaaaatccgaattttcgggcaataaaggcctgttcatctaatgagaattctgttataatgagtgcatcgaaatcgagatgtggtcgtcaagctggttgtcaagcggcggctccaaatcaccattatcaggaggaaaaacttatggcaagtgtaacactgaaaaatgtctataagatttacgccggcggcgttacggccgtcacggatttctgcttggacattgaagacaaggagtttatcattctcgtcggaccttccggctgcggtaagtccacgacactgagaatgatcgccggccttgaagagatcagcaagggcgagctttatatcggcgaccagctcgcaaacgatgtggcgccgaaggacagagatatcgcgatggtgttccagaactatgctctgtacccgcatatgaccgtttatgataacatggcgttcggcctgaagctcagaaagacgccgaaggatgagatcaagcgccgcgttgaagaggctgcccgtattctcgatatttcccacctgctcgacagaaagccgaaggcgctttccggcggccagagacagcgtgttgcgctgggccgtgccatcgtccgtgacccgaaggtcttcctgctcgacgagccgctttccaacttggatgcgaagctccgtgcgcagatgagaaccgagatcgcgaagctccataagagacttggcaccacgtttatctacgttacccacgaccagacggaagctatgaccatgggcgacagaatcgtcgtcatgaaggacggcttcatccagcaggtcgataccccgcagaacctgtatgacctgccggtcaacgagttcgttgcaggctttatgggttccccgcagatgaactttgtcgacgctacgctcgtgaaggacggcgcagaatatgccctcacgttcggcggcacgaaggttaagattccggcgaagaaggcgaacgctgaaattgcgaactatgttggcaaggaagtcgtcttcggtatccgtccggaggatgtacatgacgagcccgatttcctcgcgaagtccggcgattccaagacgacggctgacgtcgaggtcaccgagctcatgggcgcggagacatacctctacctcaactgcgaaggcaatgccctcacggcgcgtgttgagccgacgtcggttgcgaagtccggtgataagatcacgatcgctttcgatatgaacaagatgcacctgttcgacaaggaaacggaaaagacgatcctcaactaagagatcgtattatatcgcgtaaacttggcggcgtccccgaaagggggcgccgtttttgcgtgtgtgcgaagaaagccccgcacggctgccaaggcgtggagcgtgcggtgaggggagagaccggtgtggtgcgccgcggcctgtgctggcgctgtatgccgccgaaagcggcggtttgcggtcggatgataccgacagcgggttcagccggtataaattcagccgatgcagcgccggttcagggagcggctaaggccggcgcggggagaaatgctgcgcgcatcgccggcattcgtgcggccgtggctgcggggcatgcggatgcagcagacacggcgcgcccgcaggcagtaggggaaggcggcgccgaagccgtgaaaaaaggaatatgcacctataaaattccccatacgatcaaatagaaccggccttgtttgtgcaggattacgaagttcaaaaaaaattactcaaaaagacttgaaaattcaaaaagaattctgtaatataatagtagatagaatggatacctgtgcggagaccgtcgattgccgtgcagggttgactataaatcggcggagaaaagaggaaaaaacatgtctaacagattgtttcagggtgttattcaccagatgcgtgactctattgaccgcaccatcggcgtgatcgatgaatcctctgttatcattgcctgcagcgagctgggcaagatcggcgaagtaacggattccgtcacggcggaagacattgcgtcgcaggctgcttttgtctccggcaattacacgtacaagtccttcggcagccgcccgcgccccgaatacgccgtgtttgtttccggcaacgatcccgaggctgcaaagtacgtcggcctgcttgcggtttcgctgaacagcatcaagcagtattacgacgagaagtacgaccgcagcaatttcattaaaaacgtcattctcgacaacatcctgccgggcgacatctacctgaagagccgcgagctgcgcttcaacgcggatgtcagccgcgtctgcatgctcatcaaggtcacgagcaagacggatgtctcggcctacgacgtcgtgcagaacctgttcccggacaagaacaaggacttcgtcatcaatatcaacgagacggacatcgcgctcgtcaaggagatccgcaacaacatcgacccgcgcgacatcgacaagctcgccggctcgatcgttgacacgctctcgagcgagttttacacgcactgtgtcatcggcatcggcacggttgtcgacagcatcaaggatcttgcgcgctcgttcaaagaggcgcaggtggcgctcgaggtcggcaaggtgttcgacactgaaaagaccatcgtcagctacaataacctcggcatcgcccgcctgatctaccagcttccgaccacgctgtgcgacatgttcctcaaggaggttttcaagcgcggctccatcgaatcgctcgaccacgagacgctgtttacgatccagcgcttcttcgagaacaacctcaacgtctctgagacctcgagaaagctgttcgtccacagaaacacgcttgtctaccgcctcgaaaagatcaagaagatcacgggcctagacctgcgcgagtttgaggacgccatcgtgttcaaggtggctctgatggtcaagaagtacctttcgagcaatccctcgaagttctgatgctttccggcattacaaaaggttacaaaagttacaaaataattacgtataattctttatgagaattaaaaatggaagccttgttggtataatgaaaaaagccgatagggcttttgttttgtctaaatttgcgcagggcggttttgagggcgccgcgcagaactacataccatctccaaaggaggattacccgtgattgaattccgcaatgtttctaaagtttataataacggtacggaagcgctgcacaacatcaacctgaacgtggagaaaggcgagtttgtctttatcgtcggttccagcggcgcaggcaagagcacgtttttgaagctcatcacctgtgaggagcggccgaacgaggggcaggtcatcatcgacggccaggacgtcagccacatccgcaagggcaagatcccgtatgtgcgcagaaagatgggcctcgtgtttcaggatttccgcctgatcgaccacatgacggtctacgacaacgtggcattcgcgatgcgcgtcgtcggcgcttcgccgaaaacgatcaaaaagcgtgtgccgtacatcctgagcctcgtcggcctgcagcacaaggcgaagcattacccgacggagatgtccggcggcgagcgccagcgcgtcggccttgcgcgcgcactggtcaataacccctcgatgatcatcgcggacgagccgaccggaaacatcgaccctgccctttcctttgagatcgttgatcttttgagcgagatcaaccgccgcggcacaacggtgctgatggttacgcacgagcactcgctcgtcaagcacttccacaagcgaatcatccagatccacagcggtgagatcgtggccgatacggctgcgctcgcgcgggagccgcatcaggcggcgaccatctcgcaggatacggagacggtggaccgcgaggcgatccgccgcgcgaaggaagcgcgccagaaagcagacgccgaggcgcggcagtttgagagcacaagggaattttcggcgacggaggccgtgctcgcggacgacgcagacgcacaggacgccggcgaggaagcctgatacgctggaaaggacgggataaggatctatgaaatttcacaatatcggatacctctttaaggaaggcatcaaaaacctatggaaaaaccggacgatgagcatcgcctcgatcggcgtgctgatctcctgcctgctgctgacgggctgcgccgcgctggtttccgtgaacctgacctccatgatggcgtccgtcgagggcaacaacagcatcacgatctatctgaccgagggcctgccggcgctgaccgcaatcgagatcggcgaccagatccgtggcattgaaaatgtgagcgactgcactttcattccgaaggacgatgcgctggccgatatgatggagcgcctcggcgacgacggcacgattttggagggcctcgagggcgacgacaactttttgcccgacgcttacacgatttcgatgtatgatttgaccatttatgatgaaactatggaacagattcagtcgatcgagggcgtggatcactacacggattacgccgatattgcctcgaagctctcgagcatcgatatggtcgtgcgcatcgcgagcatcgtgctgatcgccgtgctcggcgtcgtttccctgttcatcatttcgaacacggttaaggttacgatgttctcccgccgcgcggaaatcaacatcatgaaatccgtcggcgccacaaacggctttgtccgcattccgtttatcgtggagggcatggtcatcggcctgatctccggcggcatttcggtggcgattctgcttttggtgtacgatcaggcggttatggcgctgtacaatgttgcgccgttcctcaccgcggtggatatcgacccctatttcttctatatcatcgcggcgtacgtcgttatcggcgcgctgttcggacttctcggcggcagtatctcgatcggcaaatatttgaacaaggaaggagagaacgctgttgtctaagcgttgcgcaatgcgtagcttagccgcattctcacttgcagctctgttatttgcctgtgccggcattctttcggcgccggccgttcatgccgaatccatctccgatctgaaagctcggcttgcagatttagaggcggaggaagaggaaaacaacgcgcagcttgaagtgctgcgcggcgatatggatcaaaaacgcgagcggggcgaagcgctgtgcgcagagctcggcgcggtgcagcagcagctcgacgcgctcgacagccggctcgagcggagcgaggcggaagcccccgcgcctgcagccgcactgggcagcgcggagacgccgcggggtgacggggcggctcaggaggccgccgcgtatacgctcgaaatacttgaggctgagggcgctccggcggaagcggtgccggggcagctcggcgccggccgcgagacgctggcggagagccgagcggcgctcagccggcggaacacggcgattttcgcgctctatgaggaaaacctcctccagttccggcaggccgagcaggaagcggcgcaggcggaggcagaggccgcgcgcatcgccgcggaaaaagaggcggccgcggcggcagttgacgtgtggtacacggaatacgacgctgcgctgcaggcggccggcgtcaatgccggcggtgcagaaagcgccggtgcgggcggttttgtctggccgatgccgggctacgattacatcacctgcgactacggcgacgacgggcaccgcggtatcgacatcgcgggcagcgagatctacggccagccgatcgtagcggcggcccgcggcgaggtcgtctacagcgactggatggacagctacggctactgcgtgttcatcgaccacggcaatggctgctccacccggtacgcgcatgcgagcgcgctggcctgttcggtgggcgacgtggtttcgccgggacagacgatcgcgtatgtcggctccaccggcaattcgaccggcccgcacctgcactttgaggtgcttcgcgccggcagcacgaccgatccgttcgattactattaaatgcaaagccccgatcctgtttaaggatcggggcttttgtgcgcgctgttctgtttggggaccggaaaggaagcgggcgcttttgaaaaccgccggcctgcgctgcggatgccggccgcgaaagggaggcggctggcattcggctatttcggaaacgcgcggaattcgtcgagaaaccagaccttttccgccgtgaaggtgcggccgtcgagataattcaggatgccggcgtccgttttgaagcggaatgtcagcttgtacgagtagagcgcctgataaggaaagcccgtctttttgttatcggcgtttttgccgtacttgccgtcgccggcgagcgggtggccgatcgaggccatgtgcgcgcggatctggtgcgtgcggccggtcaagagctcgacctccagcaggctgtaatcgcgccgcgtttcgagcaccgtgtatttggtgcggatgctccggctctcatccgtcttgcggctcgtgatatagacgcggttctggctctcgttcttttcgaggtagccggtcagcgtgtcgctcttcttttccggtacgccgcagacgacgcacagatacagcttgtcgagctcgcggtgcttgaccttctcgttcatgatgcgcagcgtttcggcgttctttgccgccattacgatgccgccggtgttgcggtcgatgcggttgatgagtgccggtgcaaaggcattttcctgctcggggtcgtattcgccgcggtcaaaaaggtagtgctgcacgcgggcgatcagcgaatcaaagtggtagtgctcgtccgggtgcacgatcaggcccggctttttgtcgagcagcatgatgttttcgtcctcgtagagcacactgagcttgacgggcgcctttaaaaagtcgtaggctttcggggactgcgcgaaaaattcatccttgaggtacatcgtcagcacgtcgccggccagaaggcgcgtggagatctcgcagcgcttcccgttcaccttgatgtcctttttgcggatcgccttgtacagcatggactgcggcaggttcgggtaggccttcgtcaaaaatttatcgacgcgctggttcgcgtcgttcggcagaacggtaacctgtttcaagcggcttctcctttcttatgcgtccgccgcagcgtgaagaaaaacggcggcagggagaccacgatgccgatcgcgatcgcgatggcaacggcgattttgatcgtctccatgccggtggagagcgcggcggcgttgtcgttcatgaaaatgtgatagcccgtgtagtagatgcctgcgccgggcacgatggggaagatgccgctgattaaaaagactgtgagcggcgcgcggcgcgcaaacgagaagatgcgcgagatatacgtcagcccgagcgcggcgaagaaggaggcgaacacggcgtccgactgaaagtgcatgtagacgatatagatcagccagccgaccgcaccggcgatcccggcgaaggcgtactggttcttcggggtgtggaagatgatcgagaaggcgatggtcgcgatgaaggaaacggcggtttgcagcgcccagtcgaataaaacggcaggggtcatagcagcggagcacctcccgcaaaattgaagtagagcatgacgacggcaccgacgccgatcgcgatgcagccgccgatcagaaacgcgtcgatcatgcggatcgtgccgctcaggtagtcgccgttcaaaaagtcgcggatcgaggtggtcagcgcgacgcccggcacaaggcggatgatcgagccgataatgattttatcgaggctgtctccgagaccgagcgaaaagagtgccacggcgcagcaggcaaccagcgcgctggaggcgagatttgtgatgaattttgaggcggcgcgccggtctataaggtttagaaaaacctgcaatacaatgccgcagaccagcgcggcaagcgcatcgaataccgagccgccgaacagatagctgaagcaggcgctgccgacgccgcaggaaatcgtgagcgccagcgggtgtgtataggggatgccggcgatcgaatgcaggcggccgcaggcctccgaaatggagataccgccgcaggcgatctcgcgcgaaagctggttgatgcccgcgatgcgcccgaaatgaatcgtggagccggggatgaatttgagctttgtctccacgcgccgcccgttttccacggcgttcgcaaagatcgcgttcgagagcacgtatacattgtactcgtcgatgccgtaggcgtgcgcgacgcgctccattgtctcctgcacgcggaaaatttccgcgccgttgcgcagcagcgcctcgcccatccgaaacgagagctccgccgcgctttccgcgcgtgccggtccgtctgtcatagccgttcccctcctttgtaaataaccgcaacaagtttacagctttttgcaggcggtgtcaaccatttgcggacaaaatgcggctgcttgtccgcggtttttacgatttttctgcgccggcctccggcggctttttcatcgtgaggccgatgcggccgcgctccacgtctacggagagcacccagaccgtcacgatgtcgccgaccttcagcacgtcggacgggtggcggacgaatttgttcgagatctgcgtgatgtgcacgaggccgtcctgatggacgccgatgtcgacgaacgcgccgaaatcgatgacgttgcgcacggtgcccttcatctccatgccggccttcagatccttgatgtccttgatgtcgctgcgcagcagggggctcggcagctcgtcgcgcgggtcgcggccgggcttctcgagctccgcgaggatgtcgcgcagtgtcggcacgccgacgccgatctgtgcggcgagcgccggaataccgagcgcctcagctttttttcgcagctcggtgaaaccgcccgccggcgcctttttgatcgtgtagccgcaggcggtgagcagcgcttcggccgccgcatacgattcggggtgcacgccggtattgtcgagcaggttgcggctttccggcacgcgcagaaagcccgcgcattgctcgaaggccttcggcccgagctttggcacctttttgagctgcgtgcgcgtggtgaacgcgccgttttcctgccggtaggcgacgatatttttggcgacggcgctcgagatgcccgcgatgttctcgagcagcgagggcgaggccgtgttcaggtctacgccgaccgcgttgacgcaggcctcgaccacaccgccgagtgcctcgccgagctttttcggcggcatatcgtgctggtactggccgacgccgatcgccttcgggtcgatcttgacgagttccgcgagcggatcctgtaagcggtgcgcgatcgaaacggcgctgcgcagcgtcaggtcgtagtcggggtattctgcggcggcgagcttcgaggccgagtagaccgaggcgcccgcctcgctgacgaccatgtaatcgaccgtatcgagcaggccgttttcgcgcagcaccgcgtcggtgaagatctcggtttcctttgaggccgtgccgttgccgatcgcgatcagcgtggcgccgtgctttttgatgagccgcacaagcgtctgcttggcctcgcgcacgcggctctcgctgtgcgtcgggtagatgacgccggtgtcgagcaccttgccggtcgcatcgacgacggcgaccttgcagccggtgcggtatccggggtcgaggccgatggttacgcggcccttgaccggcggctgcatcaagagctggcgcaggttgagcgcaaagacgcggatcgcgttctcgtccgccttttcggtcagctcgctgcggatctcgcgctcaatggcggggaagatcaggcggctgtagctgtcgagcgcggcttcttccacggcgtcgctgcacggcgtgccgggcttcacgaacgcgctggtcacgacctgttggctgcgcgcggcgtcgagctcgagcgaaaccttcaaaaagccctcgcgttcgccgcggtcgagcgcgagcacgcggtgcccggcgattttggaggccggctgggaaaattcgtagtacatgcggtagaccgagtcctcgtccttggcggcgcggctcgtgacgatgccctgcgccatcgcggcgaggcgcagccggcggcgcacggccgcgtcgtccgagatgatctcggcgatgatgtccttcgcgccggcgagcgcgtcctccggcgtttcaacgcccttttcggcgtcgacgaagtcctcggccatgtcgatcgggtagggggagcgtttctcctgcgcgaggattttctgcgcgagcggctcgagtccgcgtgccttggcaacgctggcgcgcgtcttgcgcttcgggcggtaggggcggtagatgtcgtcgatttcggcgagcgtcgcggccttgccgagtgcggcggcgatttcatcggtcaggctgccggcgttttcgatcagcccgcgcacttcctcgcggcggctgtccagcccgcgcaggtactcgagccgctcgaaaacggagcggatcgtctggtcgtcgagggagccgtgttcctccttgcggtagcgcgcgatgaacgggatcgtgttgcccgcgtcgatcagctcgatcagcttttcggtttgtccttttttcaggttgaactgcgcggcgagcgcggctgcgtaatctgtcatatcgatttccaactttctgtgcattgtgtaaaatgttcggttttttgggcgtctgcattgcaatccccgtgcttttttgctatactgattctataatagccgggatgcggcggtgcgcccgctgctttttgagtataacacaaatcgtgtgaaagataaagggtgaaggccgaaaatgatcagcggtgcggaaattatggtgcggtgcctcgaggctgagggcgtggatacgcttttcgggtatccgggcgctgccatctgcccattttacgacaagctgtacggcagcgcgatccgccatgtgctcgtgcggcaggagcagaacgcggcccatgcggcgagcggctatgcccgggcatcgggcagggccggcgtgtgcgtcgcgacctccggccccggcgcgctgaacctgatcacgggcattgcgaccgcgtacatggattcgatcccgatggttgcaatcacggggcagatcaacctcgagcagctcgggcgcgacgtgtttcaggaggcggacatcacgggcgcatgtgaatcgatcacgaagcacagctaccttgtgaaggatgcggcggagctgccgcgcgttttccgcgaggcctttcacatcgcgatgacgggccgccccgggccggttttgatcgacgtgccggttgacgtgcagcagcaggaggtcgaggggccgttcgtctaccccgaaagggctgagattctcggctataagccgacgacgcaggggcatcccgtgcagatcaagcgcgcgcttgcggcgatcgagcaggcggagcgcccggttatctgctgcggcggcggcgtcgtgctcgccggcgcgcgcgaggagatgaccgcattcgcgacgaacagcggcatcccgatcgtttcgacgatgatgggcatcggcgtgatgcccatgcacagccccgtatacctcggcatgatcggactttacggccgcagctacgcgaaccgcgctgtgcgcgaggccgacttgatcatcctgtgcggcgcgcgcgtgggcgaccgcgccgtggccgcgccgaaccagatcgcggcgcaggcgaaaatcatacatatcgacatcgaccccgcggaaatcggcaagaacatgcgcgcagacatcccgatcgtcggcgacatccgcggtattctgcatacaatggcggagaaggtgaaaaagacggagcgcagcggctggattgaccgtgtgctcggctacaaggcggcgtttgtgccgcggggcgagccgcgctgcgattttgtggagccgcgcgcgttcatccgcaggctttccgaaatgatggaggaggacgcgatcctcgtggcggaccccggccaaagccagatttgggcggcgatcaattttacccagcgcgaggggcgctttctgacgagcggcggccttggcacgatgggctattcgctgccggcagggctcggcgccgcgatcgcgaagccgcggcggcaggtcgtttccgtgtgcggcgacggcgcgtttcagatgagcatgtgcgagctcggcacggtctgccagagccacgcggcgctcaaaatcatcgtattcgacaacgcgcgcctcggcatggtgcgcgaattgcaggataagctgtacggcggccgccactgcggcacgtacctcggcggcggaaatccggatttcgtcgcgctgtgcagggcatacggcattccggcgcagctcgcggcaagcaacgcggaggccgagcgctttgcggcggagatgcttgcggcgcgcgggccgttcgtgcttgtgtgccgcacggacccggatacgccgacggtctgacgggaaggagagggttccgatgaacaggtacacgctttcggtgctggtcgaaaaccagcccggcgtgctttcgaaggtggtcgcgcttttttcgcggcgcggcttcaacatccacagccttgccgtggggccggcgcacgacgaaaccgtttcgtgcatcacgatcgtcgtcaacggcgatgagcacacgctcgagcaggtggaaaagcagctcaacaagatcatcccggtcatcaaggtgcgcaacctcggcctcaggggcgaatttgtttcctgcgggctggcgctcgtcaaggtgcaggccgagcccgaaaagctcgagggcatgatgcagcttgcgaagctcgtcggcgccgaggcggtggacgccgcgcccggccttgtcacctataaaatcgcgggcgaaacggagaaaatcgagaatttcctcgatatgctccgcccctacggcatccgcgagatcgtccgaacagggcagatcgccatcgagaaaagcggaaaataaccgaggtttttcaggtcatagaaccttgaaataaacaaaaaaacatcgaatgtaaggagtttgtatgatgcaaaagcaatttccaagaaccgttgtgggcggcaaatccgtctcgagaatgctgatcggcacgaactggctgctcggctggagccaccgcacgccttcagccgaccgttcgatcacgacgaaatacaattcggacgaggcgtttttcccggtgttcgaggcctacatgcagtacggcatcgacacggtgatggcgccgatggacgaaaagatcgtccgcgcgatccgctatgcggaggataagctcggcaaaaaattcattctggtcgacacgccgcagatcaatgtggacgacaacgcggccgcacgccgtgaggcggaggcgcgcatcaagcagagcgccgcgaacggctgcgatttctgcctgatccaccacgcgagcgcggaacagcttgtcaacaagaacaagggtatcatcgaccgtctcgacgactacacgaagatgatccgcgacgccgggctgatcccgggcctttccgcccacatgccggagatgatcacctacactgatgaaaacggctacgacatcgagacgtatatccagatcttcaactgcgccggatttttgatgcaggttgagatagagacggtcgcctcgatcatccagaacgcgaaaaagccggtcatgaatatcaaatcgatggcggcgggccgcgtcacgccgtatgtcggtcttacgttcaactggaacgtgctgcgcccctgcgatatggtgacggtcggcgcgttcagcgcggacgaggtgcacgaggacgtcgagatctcgctcgcggcgctcgagcaccgcttcccgaacctcgagaagcgcgcgagcccggtcatgaatcaggcggcattcggcaaataaacggcggagccgaagagaatggagcggattccgaaatgatcgatacagttgtttttgacattggaaacgtgctcgccgaatggcattggcgcgagaatttcaccgcgatgttcggcgaggcgctcgtcgagccgctggcagacgccacggtgcgcagccccgagtggtacgagatggaccgcggcgttttgagcgagtcggagctgattgcactgctcacgaaaaacgcgccgcagcacgcggcggagatcgagcgtatcgtgcgggagaaccacacgttcgtcacaacatacccgtacgcggacagctggctgcgcggcctgcacgacgcgggctataaagtgtatatcctctcgaacttcggcgatttcagctataaccgcgcgaagcccggcttcacatttttgaagcatgcggacggcgcgctgatctcctacgaggtgaagctcgtcaagcccgatcgcgcgatttacgaggcgctctgcacgcggtttgacatcgtgccggaaaacgccgtgtttctcgacgaccggccggaaaatacggaagcggcgcgcgccttcggcatgcaggcggtcacggtagaatccaaagcgcaggcggacgcggcgctgcgcgagctcggcgtttgctgggcggaataaaagccttttaggccggggagccggaaaaacagaccgaggcgcgccggcagacaataaaaaataggaaaggaaaatgcagtatgaagttagggattatcggttcgcccgaggcaaaaaccctcgtgcacgcaaaggaactcggactcgattttgtcgagtttgatctgaacccaagcgatttttttgggcgtccgctcgatgaaatcacgccgaagctcggcgagattcaagcggcgatggaggagaccggcgtcgagatcggcgcggtcggccgctgggcgagccacatcctcgacgagaacggcgaggtgatcgaggcggagtggagcgaggtcaaaaaggttatcgatttcggctcggcgctcggcgcgaagcactatctttgcagcgtggcctacgtgccgcagctctcctactacaagaacatcaccgccgcgatcaaggtgctgaaccagatcgtcgcttatgcgaaggagcgcggcatgcagtgcgccatcgtcaactgcatgatgggcggcaattacatccgcacgccggagcagtggaagctcgtgctcgacgaagtgccgggtctcggcatcaaatacgacccgtcccacagcttcgtgcacggcggcgacaagggcgcatatctggaggagggcctcggctggggcgaccgcttccagtactgccatgtcaagggcgtcattcagggcggcgaatcgagcgagccggagcattggagactgcgcgagatcatctcccgtcacccggagctcgccgacgaattcaaggacgtgttcgcagagggcggccgctggtacgacaacccgccggctggcatcgattcgatcaactggcgcgcgttcttctcgatcctctacaagtacggctacgacggctacctggcgatcgagccgcactcggcgacgtggcagggcgaaaagggcgaaaagggcgtcaagtacacgatcaagtatattcgcgatctgatgctgtaagcctcgtctgcccgctttccgccttgtgcggagaacctaagatgaaatgagaatgccccggatgcagtgtgcaagctgcatccggggcgttttcacatggagcggagaaacgtttttttttgcgggcgctttttaccgctgctcgcagaaaaaccaagtaagcggtgcaaggaggaagtaagaagcccttgcaccgcttacggtcggaaaatgcttattgaatgtagtcggtcgaaacgtagccggttttaccgttgtagcgcaccttgtaccacgcgtcgctggtcttttcttcgattgtgaccttcgcaccctgcgggatcacgagcagcactgccgtatccgttccggcgccctcgcgcaggttgagataagcggtcgtttccgccgtgtcaccgaccgcggcgctgctcgtcagccgaatatattcgctgaacatatagccgctttggccgttgacagtcacgccgtaccaatcgccgtcgcttctgtctgtgactgtgatcgcagtgccggtcggaatgacgccgagcgagctgtagtttgtgccgcgcccgctgcgcaggttgacataggtcgtcgttttagcggcgagcgattcgctgccggaggcgctgctgtccgagctgccggaatctccgccgccggcgttatccgtcagccggatatattcgctgaacatatagccgctttggccgttgacagtcacgccgtaccagtcgctgtcgcttctgtctgtgaccgtgattgcggtaccctcgtcgatcacgccctttgagctgtagtttgtgccgcgtccgctgcgcaggtgcacgtccgcggttgtcacggccgggtcgctgccggtggccggcacatcgtcggaaccgctgtccgtgccgcccgaaagccgaatgtattcgctgaacatgtagccgctcttgccgttgacggtcacgccgtaccacgcgctgtcgctcatatcggtaacggtgattgccgtgccgccggagatcacgccgagcgagctgtaattcgtgccgcgcccgctgcgcagatgcacgccggtcgtcgttgtagcggcctcgccggaaacagagggggtatccggtgtaccgctgtcgtcgtccccggtatccggcacggagccggtcaggttgatgtattcggaatagacgtagcccttctggccggagccggtcgtcacggcgtaccattcggcgttcttcgtgcttgtgacattgaccgaggtgccttctgcgagtaccgtgatcgtatcgtagctgaggcccgggcccttgcgcaggcgcacgcctgcggtggttttcgcgttgaagcttgaatcagcgctgtcgtagccgtcgtttgaatcatcgtccggcgtcttgtcggaaacgccgtcgctgccgaacgtgtaggtcacgccgccgatcgtgcgcgtcgtgttgatgatgtactcgccgttttcgtagtagaagtagtcgccatcgaatttataccagccgttggtcgggtatgtaacgcagtcgagcttgtgccactggatccagccgtggccggggatcgattcgtagcgcatgttcacgccccacgtgctgttgtccaccaccatgttgttgccgacatagacgcccacatggtcgtaattcgcaatcgtgacgattaggccgtgcgtgcgcgggattgtttcaatggggccggaggcgctcgaggcgttggcctgcgcggtgacggtgcgcgggtaattccagtccggctcgatattgctttcgtcgtctacccagcagaaataggagtagatcaggccgctgcagtccgaggtgcgcacgccgtctgaattgaaatttccgtagccgccgtagctgtacagccagccgtcgcggtaggccttgagggcgtgctcggcgaggccgatcgaagtgaggccgcttttggcctcggcctttgtcgtcatgccgggcagcgcaacgctgcccgcggcaatcagcacggcgagcagcagaaccgccgcggtacgcgttattttctgaaccgattgcatcttgctttcctccattttcctttgcattctctattgtgcttcgtcctttgatttcaaaagtattacaaattggttacattgtaacacaatgattacaaatgtgcaaccccttctttcgcgatccggcgattttttttcggaatatggcttggaacttgacaaaaagcggcgtgaatgcgataatgaaaattcagaaaaggctttctattttatagatataacggagggatttagccggtgtccaaagagcttgcaaaggcgtacgagccgaaagaggtcgaagaccgcatctatgacttctggatgaagggaaagtatttccacgccgaagtcgacccgaaaaagaaaccgtatacgattgtcattccgcccccgaacatcacggggcagctgcacctcggccacgcgatggacgagaccctgcaggacacgctgatccgctggcgcaggatgcagggctattcggcgctgtggctgccgggcaccgaccatgcgtcgatcgcgacggaggcaaaaattgtcgaggcgatgcgcaaggagggcatttccaaggaggaccttgggcgcgagaagtttctcgagcgcgcatgggcatggaaggatcagtacggcggacgcattgttgagcagctcaaaaagctcggctcctcctgcgactgggaccgcctgcgcttcacgatggacgagggctgcaacaaggctgtcaaccacgtgttcaagaagctgtacgacaaggggctgatctaccgcggcgagcgcatcatcaactggtgcccgcactgcaagacctcgatttccgatgcggaggtcgagtttgaggaaaaggaaggctcgttctggcacctgcgctatccgcttgcggatggtacgggctatattgagctggccacaacgcgtccggagacgatgctcggcgataccgccgtggcggtgcacccggacgacgagcgctataaggcgctggttggcaagacggtgatcctgccgctcgtcaataaggaaatcccgatcattgcggacacgtatgtcgagcaggatttcggcaccggcgttgtgaagatcacgccggcgcacgacccgaacgactttgaggtcggcctgcgccacaagctgccggtcatcaacatcatggacgacggcggcgtcatcaacgaaaacggcggcaaatacgcgggcatgcctgcactggaggcgagaaagcagatcgtgcaggatctcgatgcgggcggctacctcatcaagattgagccgatcaagcacaacgtcggcacctgctaccgctgcggcacggtcgtcgagccgcgcgtttcgacgcagtggttcgtgaaaatggagccgcttgcgaaaccggcggtggatgtcgtgaaaaatggcgagatccgcttcatcccggaccgcatggataaaatctactataattggatggagaacatcaaggactggtgcatttcgcgccagctctggtggggccaccagattcccgcgtggtactgcgactgcggcgagacgatcgtttcggaaacggagccgaaggtctgcccgaagtgcggcggcacgcatttgaagcgcgacgaggacacgctcgacacgtggttttcctccgcgctctggccgttctccacgctcggctggccggaaaagacgccggagctcgagtatttctacccgacggatacgctcgtcacgggctacgacatcatcttcttctgggttgcgcgcatgatcttctcgggtctcgagcatatggacgcgattccgttcaacacggtgttctatcacggcctgatccgcgacgcgcagggcagaaagatgtcgaagtcgctcggcaacggcgtcgatccgctcgacattatcgccgaatacggcgcggacgcgctgcgcttcacgctcgtcacgggtaacagccccggaaacgacatgcgcttctcggaggagaaggtcgcggcctcgcgcaactttgcgaacaagatctggaacgccgcgcgctttattttgatgaatatcgagggcaaggacatcgaatgcacgctgcccgaaaagctgttcacgagcgataagtggattctaaaccgcttcaacaatgtcacggcggccgtcaccgaaaacctcgagaagttcgagctcggtatggcggtcagcaagctgtatgacttcatctgggacgatttctgcgactggtacatcgagcttgcgaagatccgcatgaacggcgcggacgagcagagtgccgacagcgcgcgccgcgtgctcgtctgggtcatgagcaatacgctgaggctcctgcacccgttcatgccgtatatcaccgaggagatctggcagacgcttccgcacgatggcgaggcgctgatcgtcgccaagtggccggaatacgacgaagcgcttgcgttcccggcggaggctgccgacatggagaaggtcatggcggtgatccgcgcggtccgcgtgcgccgcaatgaaatgaacgtgccgccctcgaaaaaggcgcacatttatatcgaaacggcgcagcccgcgccgtatgccgagggcagcgagttcatcgtgcgcctcgcctacggctccgcggttgagatcggcgcgagctttgcggtggagggcgccgtcacggccgtgacggacgacgcgaaggccctgctgccaatggacgaccttgtggacaaagccgccgagatcgcacgcctcacgaaggagctccagaacgcgcagaagcagctcgataacgtaaacgcgaagctcgcgaacgagaaattcacctcgaaggcgccgcagaacgtcatcgacggcgtaaaagcgaacggcgagaagctctcggcgaagattaagctgatcctcgagacactggaaagctatcggtgattttttacggttggctcccttttttagggagccaaccacatttataaggagggtatacgatgacgtatgaggaagcgcttcagaaaatcaacggccgcctgctgttcggcgtgaagccgggcctcgagcggattcaggcgctgtgcgatgcgctcggcaatcccgaaaagtgcacgcggtttgtccacgtggcgggtacgaacggcaagggtacgacatgtacgctgattgcaagcgttttgcacgcggcgggctatcgcacgggcctttatacctcgccgtatgtactggatttccgcgagcggtttcgcatcgatggggaaatgatcccaaaggcggagctggtcgaggctgtagagcgcgtgctgccagccgccgaaaagctcgaggccgcaggggagaccgtcacggaattcgagttcattacggcgctggcgctcgactggtttgcgcggcgcggctgcgattttgtcgtactggaggtcggtctcggcggccggatggacgcgacaaatgtgatcgacacgccggaggcggcggcgatcgcctccatttcgctcgaccacacggcagtgctcggcgacacgctcgagcagatcgcgtttgaaaaggccggcatcatcaagccgggcggcgcggtggcgctgtatgcggacaaccccgaatgcgtcgtgcgggagatttccacaatctgcgccgagcgcggtgcaaaactccatatcgccgacgagcgccgcatgcaggtgcgcggcacctcgctggacgggacggcattcacctgggacggcctggcgctcacgacgccgttcaccggcgcgcaccaaatgcacaatgccgcgacagcgctgaccgtggtcgacatcctgcgcgagaggggtgtgcagatttccgacgatgcgctgcagaagggctttccttcggcgtatattccggcgcgcatggaacggctgagcgaaaagccgctcgtcatcctcgacggcgggcacaatcccggctgcgccgcggcgctgcacgaggtgctcgcgacgcatctcagcggccggaagatcacggccgtgatgggcatcatgtccgataaggacagcatgcgctacctcgcgcgggtcgcgccgcacttctcgaaaattgtcacgctggcgccgcacaatccgcgcgcgcttacggccgaggcgctcgccgaggaggcgcgggccttctgtgccgacgtcaccgcggcctcgacggtcgaagaggcgctcgcgctttcgcgcgtcgagggcgacgaggtacttgtgatctgcggttcgttcttcctcgcgagcgagatccgcgatgcggcgatcacgtactatacaaaataattctgccgacagattccggcagaaaatacgggcgggctcctgtagaatttcctacaggggcccgtcctttttgtactcaaaaacggcgggacgcgagaatgtgccggcgcctttagggccggcggctttccggcgcgtgctttttaccgccggcttggatgcccaaaagaaaaggaatgatagcgtatgaatctgcgaatcgaattgaaaaacggcgtgatgaccgccgcgatgcgcggcgagctcgaccaccacactgccagcggcctgcgcgaggagatagacggcacagcgaaaaaggtgaagccgaaggtgcttcgcctcgatttttccgaggtgccgttcatggattcctcgggaatcggcctgatactcgggcgggtgcgcatggcggcgctctggaacggacgcgtggccgtgacgggcctttcgccccagcttcggcgcatggcggagctttcgggcgtcgcgtcccttgcggcgcttgaagatccggtaaaggaggcagtaggcaaatgatgcagacagtcaataaaatggaactgagctttccctcgcgctcggtcaacgaagcgtttgcgcgcggcgcagtcaccgcgtttgtgctcagtctggacccgcttgtgacagagctgaacgacctgaaaacggcggtcagcgaggccgtgacgaacgccatcgtgcacggctaccgcgacacgatcggcaccgtgtacatatcggccaagattctggcggataaccgcgtcgttgtgaagatccgcgaccgcggctgcggcataccggatattgaaaaggcgatggagccgctttacacgacgggcggtgaggaacgcgccggcctcggctttgccgtgatgcagagcttctgcgaccgcgtgcgcgtttcctccgcgccgggccgcggcacgaccgtcacactcacgaagcagatcgcgccgcgcagcgatggagaatagggaggaattcgtcgagcggaacgtggggcttgtgcggtcgctggtgccgcgctttctcggccgcggcatcgaatacgacgacctgtttcaggccggttgcatggggcttgtcaaggcggcggataatttcgacgatacccgcggcttcaagttctccacatatgcggtgccggtgatcctcggcgagatgcgccgcctgttccgcgacggcggcgccgtgaaggtttcgcgcggactcaaggagctttcgatgaaggcggtgcgcacggcggagcgcataacaaaggaaacaggcggcgagccgagcgtctccgagctggcggcggtgctcggcatttcggtggagaagtgcgccgaggcgctgaacgcgggcatgcagcccctttcgctgacgaacgatgacggcgacggcgagaccgatgtgccggtcgagtcgatggaagagcaggtttcggaccggttggcgctgcggcaggtgatcggcggactgccggaccccgaccgccggctgctcgaataccgctatttcggcaataagacgcaggtggaaacggcgaagcagctcggcatcacacaggtgcaggtcagccgccgcgaaaaaaagctgctgctccacctgcgcagcctgctgctgtaaataaatgtgaaagtgccgcccggataaatcggacggcattttcaacagcatgcgtgcggtttttggggaaaatacagcgggcgcgctttcaggctccgttttccacgagggccggcagctcggcgggcgcggcgatgcgcggcgtgttttccacatggccaaagccgtaggccgcaaagatgaagggcacgccggcggcggtggcggcgtcgaaatcccactgcgtatcgcccacatagacgggcgctttcagcccgttgcgctcgatgatcagccggatgttctcgcttttgggtttgcctgtgcgcccgatgcactcgaaatcgcggatgtatttcgccgtgccgtgcgcggccagaaaagattggatgtaaccgtccgcacagttgctcacgatgaagagcgggtgtgtttccgaaagccgcgcgagcgtttcgcagacctgcgggtacagccttgcgccgtgctctgtcaggtatgcgcattcgtaaacggcgcattcatcgaagatctcgaggcggcgggaaagcggcaggtatggaaacagcttttccgtcagttcctcggcgccgagacccatcacgccttcaagctcctcgcggctcggcaggcggcggatgtcgggctgctttgcaaggaccgcgccccaagagcggcggatctcctcggaggagtcccagagcgtgccgtccagatcaaaaataatgccgtcatactgcatgaaaaaaagtcctttctatatataaggtaaaatcagacgcgttcgagctggtttaaatcaaagggggtttgctggtaaacgtagtagttcagccagtttgcgacgagcaggtgcgcattgctgcgccacgtgaacggcggcgttttggtgtcgtcgtcattcgggaaatagttgtagggaaccttcgggttcagccccttgttgacgtcgcggaagtattccttggcgagcgtgtcgcggtcgtattcggcgtggccggtcacaaagaatttcctgccgctcttctcggcgacgatgtgcacgccggcgagatcggacaccgccagcggaatcagctcgtcgtgcgccttgatgtcgtcgaggtaaacctcggtgtagcgcgagtgcggcgcgaagtaattgtcgtcaaagccgcgcatcagggggtggtacgggttcagcaccgtgtggttgaagatgccggagatcttctcgggcagcatgtgcttttgaatgccgtagtgatagtagagcccggcctgcgcgccccagcagatataaaggacggagtagacgttggtcttgctccattccataacggcgcacatctcctcccagtagtctacatcctcaaacggcatcttctcgaccggcgctccggtgatgatcagcccgtcaaagcgctggtcacgcacgtcggcaaaggttttatagaaggtgttcagatgataggagctcgtgttgcggctcacgtgcgaggccatgtgcagcagctccacatcgatttgcaggggcgtgttgctgagcaggcgcagaatctgcgtttcggtttcaatcttcgtcggcatcagatttaaaagcgcgattttcagtgggcggatgtcctgcagggcggcgcgctcgtgcgtcatcacaaagatgttttccgattcgagcacctcgatggccggaagatcggcttgaatgcgaataggcattgaatatttgacctccatctggtatactataatatatacacgggaaaacggcggataaggccgtccggttttctaagagtatagcacacttgcggcggtttgtaaaagcaatccttgaaaaatcgccccgtttttttcaaagcggcgcagaagtttttttgaaaaaacttttgaaattgcgtgcgcagaaagagaagctgcggcaaagcgacagctttgtatagtagatcggaccgcactgaaacactatatattgtgatttgagcggccgggaagaaaaaattaaaaaaaacgaaaaaaagtgttgacattccgggattcccgtggtattatatatgagcgctcgagagagacggcaaaaaacggaaagccgaaaggctggacgaaaagagccggagagagcgcaaaggaccttgaaaattaaacaacgagagaaagaatggaacctgtaatttctttgaggagactcaaggaattaaagagtaacagaactcaaaaaatctgtgacagacgtcagagacgtcgaatgagctaagagctctaagcgtgatttggacgcggaagcgtttagataacattattagagagtttgatcctggctcaggacgaacgctggcggcgtgcctaacacatgcaagtcgaacggagattcaggagcttgctcctgaatcttagtggcggacgggtgagtaacgcgtgagtaacctgcctttcagagggggataacgttctgaaaagaacgctaataccgcatgagactacagagctgcatggctcagtggtcaaaggagcaatccgctgaaagatggactcgcgtccgattagatagtaggcggggtaacggcccacctagtcgacgatcggtagccggactgagaggttgaacggccacattgggactgagacacggcccagactcctacgggaggcagcagtgagggatattcggcaatgggggaaaccctgaccgagcaacgccgcgtgagggaagacggttttcggattgtaaacctctgtcctctgtgaagataatgacggtaacagaggaggaagctccggctaactacgtgccagcagccgcggtaatacgtagggagcgagcgttgtccggatttactgggtgtaaagggtgcgtaggcggattggcaagtcagaagtgaaatccatgggcttaacccatgaactgcttttgaaactgttagtcttgagtgaagtagaggtaggcggaattcccggtgtagcggtgaaatgcgtagagatcgggaggaacaccagtggcgaaggcggcctactgggctttaactgacgctgaggcacgaaagtgtgggtagcaaacaggattagataccctggtagtccacactgtaaacgatgattactaggtgtggggggtctaaccccctccgtgccggagttaacacaataagtaatccacctggggagtacgaccgcaaggttgaaactcaaaggaattgacgggggcccgcacaagcagtggagtatgtggattaattcgaagcaacgcgaagaaccttaccaggtcttgacatccaactaacgaagtagagatacattaggtgcccttcggggaaagttgagacaggtggtgcatggttgtcgtcagctcgtgtcgtgagatgttgggttaagtcccgcaacgagcgcaacccttgtgattagttgctacgcaagagcactctaatcagactgccgttgacaaaacggaggaaggtggggacgacgtcaaatcatcatgccctttatgacctgggcctcacacgtactacaatggtcgttaacagagggaagcaataccgcgaggtggagcaaaaccccaaaaacgatctcagttcggattgtaggctgcaactcgcctacatgaagttggaattgctagtaatcgcggatcagcatgccgcggtgaatacgttcccgggccttgtacacaccgcccgtcacaccatgggagccggtaatacccgaagtcagtagcttaaccgcaaggagagcgctgccgaaggtaggattggcgactggggtgaagtcgtaacaaggtagccgtatcggaaggtgcggctggatcacctcctttctatggagacctagcattgactgcggttaatgcttaacattccaaggttagattacagggtacgctttcaatcgttgtttaattttgagggtctttgaaaagattctcaagaacggggcatcttcgttctttctaaagaatatgggggtgtagctcagctgggagagcacctgctttgcaagcagggggtcatcggttcgatcccgttcatctccaccaagggccgaaaggttcgaatagccggtggttttaactagatatgggcttatagctcagccggttagagcgcacgcctgataagcgtgaggtcggtggttcgagtccacttaagcccaccagcggaggaatccgccaagtaccttgaaaactgaataaagcgaagcagataaaaatgcgagaaaactgttatttactagagaattattatcaggtctaacgatccaaaataattgtttagggtaataactgcaatttcgaagaagcgaaataagtaaagtttattctttgcaaagagaaataactacaaaactcatttctaattccaagaagagaacacatggtcaagctacaaagagcgcaaggggaatgccttggcactaggagccgaagaaggacgcgactaactgcgataagccacggggagccgtaagtgggcatcgatccgtggatttccgaatggagcaatccgattagagtcatgtctaatcatcatgcactgaatccataggtgcatgaggggaaccgcctgaactgaaacatctaagtagggcgaggaagagaaatcaaccgagattccgctagtagtggcgagcgaacgcggaagaggccaaaccagaagtagtaatacttctggggttcggacagcaacgtgtaggtttgagcttagcagaatggcatgggaaggccaacgaaacagtgtgagagtcacgtatgcgaaaagcgagagccgctagctgtatccagagtaccgccggacacgtgaaacccggtgggaacacggggggaccaccctccaagcctaaatactacctagtgaccgatagtgtatagtactgtgaaggaaaggtgaaaaggaccccgggaggggagtgaaaaagaacctgaaaccttgtgcttacaagcaccgagagcccatcaacgggtgatcgggtaccttttgtagaatggtccggcgagtgaatgtaactggcgaggttaaggacttcaggtctggagccgtagcgagagcaagtctgaatagggcgtatgaagtcagttgtattcgacccgaaaccgggtgacctacccatgtccaggttgaagtggaggtaaaactccatggaggaccgaaccgactcccgttgaaatggtagcggatgaggtgtgggtagcggagaaattccaatcgaacccggagatagctggttctctccgaaatagttttaggactagcctcgtattagattaccggaggtaaagcactgaatgagctaggggccgagaggttactgaactctatcaaactcagaatgccggataattgatgtacgggagtcagacagtgtgagataagtttcattgtcaaaagggaaacagcccagacccacagctaaggtcccaaagtacggttaagtggaaaaggatgtggggttgcacagacaaccaggatgttggcttagaagcagccactcattaaaagagtgcgtaatagctcactggtcgagtgaccctgcgccgaaaatttaacggggctaaatcgtacaccgaagcttgggatgcatttatgcatggtaggagagcgtcgtataaggggtgaagtcagagcggaagcgctggtggactttatacgagtgagaatgccggaatgagtagcgagaaatatgtgagaatcatattggccgaaagtctaaggtttttggaggaaggttcgtccgctccaagtaagccgggagctaaggtgaggccgaaaggcgtagccgatgcacatacggtagatattccgtagccgccaaaagatttaagcaagaggacaccttgaaaggacttgacccgggcgatggttgccccgggcgaaagggaccgaaatttagtagggaagcaagtttggacgagggcgagaaaagtcttgtgtatatcttcggcgcccgtaccgcaaaccgacacaggtagataggaagagaattctaaggccaacgggagaagggtagttaaggaactcggcaaattgaccccgtaacttagggaaaaggggtgccacagcgatgtggccgcagagaataggcccaggcaactgtttatcaaaaacacaggtctctgccaaatcgaaagatgaagtataggggctgacacctgcccggtgctggaaggttaagaggagatgtgcaagcattgaattgaagccccagtaaacggcggccgtaactataacggtcctaaggtagcgaaattccttgtcgggtaagttccgacccgcacgaatggtgtaatgatctgggcactgtctcaactacccgcccggcgaaattgtagtaccggtgaagatgccggttacccgcgacaagacggaaagaccccatggagctttactgtagcttaatattgggtttcgataatttatgtataggataggcgggagacttagaagcagtggcgccagccattgtggagtcgacgttggaataccgctcttaagttattggaattctaacctgcggccgtgaatccggccgggggacattgttaggtgggcagtttgactggggcggtcgcctccaaaaaggtaacggaggcgctcaaaggttggctcagcatggttggaaaccatgccctagagtgtaaacgcgtaagccagcctaactgcgaggatgacggtccgagcagtaacgaaagttggagttagtgatccggcggtatgagagtggaattgccgtcgctcaacggataaaagctaccctggggataacaggctgatctcccccaagagtccacatcgacggggaggtttggcacctcgatgtcggctcatcacatcctggggctgtattcggtcccaagggttcggctgttcgccgattaaagtggtacgcgagctgggttcagaacgtcgtgagacagttcggtccctatctgtcgtgggcgcaggatatttgaggagagctgtccttagtacgagaggaccgggatggacgcacctctggcgcaccagttgtcacgccagtggcacagctgggcaactatgtgcggaacggataaacgctgaaagcatctaagcgtgaagccgcctccaagattagatatcccatggcgtaagccagtaagaccccttgtagactacaaggttgataggctgcatgtgtaagcacggtaacgtgttcagcttggcagtactaataggtcgagggcttgaccatatcacttcttgagatcttcaagattgcgcacacttctccttcttatccgcttctcctttattcagtttttagggtatttgcccttttatgcaccattagctcagttggtagagcacctgactcttaatcagggtgtcccgggttcgagtccctgatggtgcaccagatatggcccgttggtcaagcggttaagacagcggcctctcacgccgttaacgtgggttcgattcccgcacgggtcaccaaaatattcctccttagctcagtcggtagagcatgcggctgttaaccgcagggtcgttggttcgagtccaacagggggagccagttatgatgtaggcgctcagtttttctgggcgctgtatgtcatattttaaatatgaaaattttctgttgatgtatgcgcacagcgtattactgtgcgcatcgatcaagagaaaatatcgttgtgcggatgttttctctgataatcttgagacttctcaatcttcaaacgatcagcagcgtactgatccacaagcgaaggcattcttgagagagaatgcttagcttctcgaggatagtgtgctcgagcagtccccattgcttgcgctgtggccggacaggagtatcattgtccccgttgtgaatcatcgccttgccggaagctatccggcatctgtgctcggtctttatcgcgtcatgcgggactgcactgtggcttgccgtcatatggagtcatagttgcggcagcaacgggaaagtatttgaagattgtttaggttgtcaaggtgcagcagtcgtttttactttgtacacagacgtgtacaaaggtacaaaaaaagcctttctccgacaaaatgcgggaaaaggctcttgcaaacagattccttgtatgctataattagcaaaggaatacaagtctcacgagttccttttcagattcactacatctgtcggggactgcttcttccaacggattgccgtccagaggaagaagccgtggggcttattctcttgtacagatttattatatcacttcttgcactgtactgcaagcatttttttgacaagaaattaaaatttgagctgccgattttctcggcagcttttttagcttgttttctgtgaaatcagcatgatctgccgccgaaggtgattcaaatccggctgcacgtatttttttagtgtgaatgctacatcggaatgcccaagaagcatcgatacacttttagggtctgctccgttttcgatcaaacgcgttgcaaacgtatgcctcaacatatgcggagtgacatgacggataccggccgccttggagactttattgcagacatatcggaaatgtgttttgcataccggatctccattccgaaggcttataatgcaatcctctggccggtgatctgcttgcagatacagaatgccaagcataccgcggacttcgggagataacggaatttttcgaatgcctttttttgttttgctgttgcgcactgtgattgtgttttgtttttggttccaatccttccacatcatcaatcgcagttcgtctctgcgcaaaccggttaatagataaattcgaagtgcaaattcatccaccatattgagtacgtatagatttgcctcaaaagctgcttgttcttcctgtgagagggcttccacctcacgttcaggagcttccgtcgggagttgtgcgtcggtaatgggatttacgatctggtcattatctttctttgcagccttatatgcttggttaaagagaacccgtatgtgcttgatagtagatttggcgtatttctcggcgagactgttgagcatgccctcaaaccgcaatgttgtgaggtcggtaagtaggatttctggaagatcaggatacgcttcaaatatccgacgccgcgcgtcagcatatgaagctaaagtagatgctttacagcgcgcaggtgcgtaatctttgagccaaatatccagccattccccgatcgtgtaatccttgttaattttgttttgcttttgcataatcatgcctcctgaaaaaattcccgatttatcggttatctcgattgtaacgccaaatcggaaatatttccgattttcgataaagtagggaacaaaaaaaggaaccgcttgatccgatcaaacgattcctttttaataattcaagtattctgttgtcaaatgccggtattccggcagcaaattccaatggaagcattatacaataagcaatagggaaaagtaagtgaaaataaattacgcgcggattgcgctttcagagagaaaaccggaagtatttccggtttttccaatagtattttacaaagaaagcgtttgctcgtcaaattcctgcgtgtactcctgtgtgtgttcttgcgagatcgataaatactccgtaagctgatgttcctccagttcagcgatcatctccgcaaagggcgttaagtttccgtttactgcatagctttccagagcgtcaaaatattccagccgtttttcctttgcaatagacactgggagaaatccgcgtgacatgagctgatagttcataatcattcgggaggttctgccatttccgtctaggtagggatgaattcgcacgaactccgcatgtgtccatgcagcaagctctatggcgttcaggtcagttttatagggcaagtctgcgaagaacattttaacttggcggtacatttcgctcggtgcggggggcttgtgtccggcaccggaaatacgtacctcgacgtttcggtatacgccgccgaccagtatgttttccatcaacagcgcatgaatatcctttacaatgctttcgttcagcggtttgccttccgcgacatttttcttgacatatgaaaacgctttcgcgtggtttgtcacttcgtaaatctcacgcagtgtttttccgcctacggaaagaccgtcttcaagaagagctttcgtctgaatcaacgtcagcgtattcccttcaatggcggtggagttgtgtgtatactcaacttcaaagctcctatcaaagctacgcagtgcttccgacggaatatggcagcgctgctctttgagcgtttctttcattcgtacaagtttttcgtaatccatagaaaccgccttcctttcgtgattatatgtattatagcttgcattttgaatttcgtcaataaagtgaaaaaccggaaatatttccggtttttcatcaagtggggaacgtggaagggaacgcctgatttgctaactgtctacagcttaagaaaagcaatatcagaaagcgcctgctgccggtgatcgccatcccgggcgagcacttgcagctcggcatatttgacatccgctgcaatcgtgttggatcgaactcgcgcgtagtaatccgcacggctctcatccggatcaggaatcagagcctgataagcgaatgccatgcgcaaggacaagcctgcattttgcagtgtatcggcggtcagcgccgccggtgcctcatgaagctggtagtatgccgccacgatctttgcttcgatttcaatgcaaagcccgatgatctcgagcttttcttcgatgagaggccgcccattctgcctgcggccaaagcaggcttgaaacagcgcctttttaccgagagccagaagatgatcgtattcagcacaccgcagttctatatgggcggccgcctcagtttcggagatcgtgtggtactggcggtaaagggacgattctcgcttaaaatagtcgtagaatatcccggtacgttcccaagcattccgtgcataactgtatatatagtgcttcccggtttcctcccggatgatgtcgcctgcgttcatgctgtccgtcaacagataaaacatcaaagagcacctccataaaagcggaagtacttccgctttttcatgctgtgtgccgatggaaactctatggaagtttgggcgattctatgctatactattcacagataaaacaccgaaacaaggagggaaaggtgtgccagataaaacgtacattgccattgatttgaagtctttttatgcgtcggtggagtgccgggaacgcgggcttgatccgatgaatacaaatctcgtcgtagcggatgaaagccgcacggataaaacgatctgccttgctgtcacgccgtccctcaagagcttcggcataccggggcgggcgcggctgtttgaggtcaaggaaaaggttcgggaggccaacgccggacggaagcagaaggctccgggacaccagctcaagggctcgtcccacttcttttcggagctgctggccgatcccgcgctggccgttgactttctgatcgcgccgccgaggatggcgttctacatggagtacagcacgcgcgtttatcaggtctacatgaaatacatcgcgccggaggatgtcgttgtctactccatcgacgaggtttttatggacgtgacaaactatctggatacctacaagctgacgccgcgcgagcttgctatgcggatcattttggatgtgcttgaaacgaccgggatcacggcgacagccgggatcggcaccaacctatacttggcaaagatcgctatggatattgaggcaaagcacatccccgcagatgagaacggcgtgcggatcgcggagctggacgaaatgggctatcggaagtcgttgtgggcgcaccgcccgctgacggatttctggcgtgtggggcgcggctacgcccggaagctggaagaaaacggcatgttcacgatgggcgatatagcgcgctgctccatacagaacgaaagtttcctctacaagctctttggaaagaatgcggagctgctgatcgaccacgcatggggctgggagccgtgcacgattgaggcggtcaaagcctttaagccaagcacccagagtatagaatccgggcaggtcttacagtatccttatgaggcagaaaaagcccgactggttatccgggaaatggccgatcttcttgtgctggatttggtggataaagggcttgtcacagatcaaattacagtcacgattgggtacgatatagagaacttgacggacccggaaagaaacaggaagtatcacggcgatgtggtgatcgaccggtacggaagaaggattccaaagcatgcccatgggacgatcaaccttgagaatcctacatcctcgacaaagaaaatcgtcggcgcggcgtccgagctgtacgaccgtattgtaaacccggagctgctgatccgccgtctgacaatcacggcaaaccgcgtcgtagacgccgatacaatcaagcaagaaaaacggtacgagcagcttgatcttttcacggactacacagcgctgcaagccaaaagggagcaggaaaaggcagagctggaacgggaaaagaaaatgcaggaagccatgctgcatatcaagaaaaagttcgggaaaaacgcgatcctgaaagggatgaatctggaggacggcgcgacggccaaaggcagaaattcgcagattggagggcataaggcatgaccggggaatacgacgatataatcaacctgccgcaccatgtatcgaaaacgagacagccgatgtccatgctagaacgggcggcgcagttctctccgtttcaggcactgaccggctacggtgcagcgatcaaggaaacagcccggctgactgatgaaaaagccgagcttggagaggatgatctatctgcgctgaacgttaagctgcgaatccttacggatcaccttgaggaatctccggaggtgagctttgtgtgcttccggccggacgaaagaaaagtgggcggcagctacgtttccgtgaccgggaaggtgcggcggatagacgaaattgccggacagattatccttgtaagtggggagaaaatacccattcacagtgtctgcgatatgcagagcgaatggtttttgcaggtgtgattgccttcaaaagcggaagtacttccgctttttactgccttgacatagcatgaaatacagctataatggaatagcaaagtaaatttagagggtggaaaatgtgaatttgaatccatatgcaacggttattgcgtatttcgacggccttgtgatctgtgaggatgatcttgaaggcttatggtttgcagaaatcccggaatccagcgcggagcttgggagtgtcattgacatagcgattctgactgagctctccgagctgccgcaggaatcccaacaaaatattttggtgttccttaaagagcagggaagaaagtgatgcgaaaaagcggaagtacttccgcttttttttcatactccaagcgttttcacccggcggtaaaaggtgctgggagacatgttaagacgctgctgcgcctgaacggcggtgatctttccagcgcgccagagggtacagacagcccggaagtttttctcgtcggtatcgatctgcggtcggcctttgagacggccttcctgttttgcaatcaacatgccttccttggcgcgctgacggatgcagtcgcgctcaagctgggccagagcgccgaaaaccgtcagcataaactgcccctgcggcgtggcggtgtcgatggattctttaaggctcataaatgcgacgccctttctttgcagctcgtctatgatgaacagcaaatcccgtgtgttgcgcgcgatccgcgagatgtccgagcataccaccgtatcaccttcccgcgcaaaggcgagcatagctgcgagctgcgggcggtctttgtttttgccggaagccttgtcaatgaaaatcttatcagccttgtgtagtctggcaacttccagttggcgtgcttcgttctgttcggctgttgaacagcgcacatagaaaataatcataggcgcgtttcctcctttgcgtgatgtgtgtcaaaaggtctcctgaaattttggcatatatcaaaagtaggaaaacatggtttttgacacacaatttttcggtgtgtcaaaaggtataccttttgacacagaataaaagcggaagtgtacttctacatgattgtcaaaagacaattttacagtaaattttctggctcgatacttgacaagttatgcaagtaagctctataattaaaccaaggactaagcctcggttttttcttcgaggacttggtatctgcaaagaagcaactgcgtgttttgttaggacgagcagttgtttctttttcttttgtcaggcatcgagccttaatccggcaaggcggctttcctcgagcgtctccattgccggattttatttttgattcttccagctatttcctttaacttagctataggagatagctttgtttttttctccttactattaaccttggggatatagtataggggggtgtcaaatttgtctagggggggtgccgggaaagaagcgcgggagcctgcggcacgggccagagcgcggagtacgtgcaggaagcaggccataaaacgcatacggcgcgcgcagcgctcccgcgagaagcggaggcggaaccggttgaaggtctggcccttgttgccgcagatatggagacggttttccgacttcatgctgataaagcctttggccgccagctcccgcacggcgcgggtgatcgtccgcatggacagcttcagcttttttgcaaggctgcggcggctgaccgcccagctttcctttccacagcagcgcgcgatctccatgtaaacggaaaaggtgctgtgcgaaaggctgcggacagcttcggattcaacggaaagggcgtaacctgtatggcaaacatagtagtagctgacaagctggcgctttgttatttctgagaagcgcacggtttcccggacgagctctttttcgcgcagctcacggatcgcgcgggcataggtcgcctcgctgatgccgagggccgcacaggttctcgctttacgccacatgaagatgtcggtctgaaaattgcggttttcctgcatgaacgcgtacaggcgcgcggctcttgcagacaatccggcattggtgacagcggtcgttgcgatgaatgcgtccatgctgtaggctccttccttgcgaattttgggtaaaataaggcgttccagtcgaggccggaacgcttggagtgtggggatattttcttttattgcaggctcatttcctgttcttcatattctaacgcttgttcctgtttcagcttgcgttcatggagttcttgattcagcctttgattttctactttcaaagcagcattttcgatttgtacacgctctaattcacgataaaggctggtgatcgcttcaacatgatgtcgaatttcacgctgcccttcagagagcagggcttgggaagcagagcgtctttcggcttcaacagaaataaatttgtctatttctgttactttgctgagaatttgacggctggcttcctgaatcccggaatgctcttgactcaaacttgcgtgttccttgcttagatttgcgtgctctgtacttagtttttctttttcatttccgattttttctttgatgtcttgatgatccctttgcagctctttctttcggtatgaggattcaagcatttcaataatgagcatgaaaacagcgcacactgaaccgataacagcaacccactccatgacaatatccgctccttcaaatttccagctaaataaagagaataagaaacatttcattagaattgtacctcatttctttggcgttttcatcaataatcggaaggatcgcggctgggcttgtctgccggggctggatgcgaatcgattgcggaggaagtatttttccttccgttttgcctgctgattttttcagacagatcgccgcagcttgcatactgtgcagccgattggtttctctgcgcagagatatagggatcgtccagttggataccccattggtcgtatcgtggaagactggcgataaatgggtgcctgccgcgccgttttaccacccattcgccaaatgcaagctgctgcagctcatccggcgtcatcaatgcgcgcgaaatcatattgacgctgcgcccggtgttggaaccgccgagaagattgtttccccgattattggtagataccgaaccggcagaaacggtctgcgtatccatcagcttgctgaactcaaccgctgtatccgacatcggggaaaagccgctgaaaatgacggtctggcagcagtcgcggatgattttctcaccgtccgccccgtatgttactttgatttgtgccggagactggatgcagggaaccagcagcacgttccgcgagcgggcggagccgaacatgccgacgatattgctcatatacgggaaaataccaaactcgtcggcatagatgtacagacgccggtccagcttgccattgcagttttcgtccgcataggtgatagcctcattgatgatttgggtcaagagcatggagacgagcacatgctttgtctcatcctcttccgggaaggtgataaatacagccaccggctccgtacagattttttcgatggtgactttcgagtcgtggcagatgatgccctctgtttcggaatcgataaaggaaagcaggcggctcatggccgttgtcataacagaggaaaactgtgcgcctccggtctgcggtgcggaaccggcaaaccacctgatcttgtcgtcctcgggcagataatcaagaatttcgtgcagctttgtgcggcttggtactcttttgccggtctcgtccttcttcggtgctttgctctcctgcaaaagctctaaaagcagcttaaagactgaaacgatatggcgctctttgggttcggcatactgcgctacaagcaaaatgacggcggtaataacaccttctgcggagtcgtagaaataggagttttgtccgccgccgtcaaagcctttcgtgcggattatggagcgcgcaaggctttttgcatagcgttcggcccggcttttgtgcgagacattcccacttgacttccagcggtcgatatatctgttgacgagcatcaggaagttatagggatcgctggttgtcgggaaccggaaattgatgttcacgcaggtgtaaccgtactgcgcgcacagcttcccatacgtgcgcaggatgtcgcccttgctgtccgtgcaggcaaacgagaggccgcacgccagcgcgtattcgatattggggaacataaaggtggtcgttttgccgccgcccggcccggctaccatcagaacatggttgtccgtcgggtctacataggcaaagcaccgtttgccacgcttttcgaggttaatgatgatgccgggttctgttggacgatttacgttttgccgccactttacaggatcgtaggggatacggatggtagactgccggatttcactctcgtaggcaaaacgtgcagaaccatactgcccgtcgccgaccgtttttcgcttgatccggttcaggctgtactggctgccgacggtgcccgcgattataccggtcaaaagcaaaacaccgaggatagtgagcccgattatctgactgcttggcatcgcggtgcagcctcctttccagcagcacaaagtacagcgttccagtccttcaggtgcggggtgtttattcgagttgtatattttttgccgtagtgccggacgtacttctgcgcagctatctgtccccaattctccggctgcgcggcgtcgttgtcaaggcagaaaacgatttcgcggatattcgggtactccttcagaaaacggcgcagggcttcgtcggagaggccgccgagagaaagatagcacgacctgtgccacggctcgtgccggtgcagggagatatagctcatcaggtcgataggggcctcgaaaacgtagagcgtatctgcggtttcgcaaacataggaaaagccgcatgtaaagtccccgccggaaacgaatccgcggtaacggtgcgctgtattggttccgcgccggtgcgcggcacggacgagcccgtttttatcgtagcagacgaatacgatattgccggaagtatcctgatagatcagcttgtcgagcaggaaatcggagacaatatccggagaaatgcagcgcgtctgcgtgaggtaggcgaataggcggcggtgatccggcgcgctggggggcaaagcaaaagccaccggaagcgcttccgctttaggcggcttttgcgggggatgaggcttagacagctcgaggctgatctgttttccatggatcagctcgagcacagcttgcgggaagctcatgccgaaaaagtgctggacaaaggctacggcagcgccgtgcttgccggtgctgttctgataccacttgtatccggttatcacgcagctgtcatgcgccttccagataaaatgcgcgccctcgcgtttcagcttttcaccgcgcgactgtaggtattctgcaatatctgtatgctgcgcagcggcgatctgcgcctgcgtcaaggggatataatcactgtgtattttcatcggaatgttcctccgcagcctcgtttgtcgtctgaatatccatgccctcggactggaatatccggacgtacttgcgcacggtttcatagctgcaatgcagctcgcaggcagcgtccatgaccgagatgctgccggggtgggactggatataggcgagtatcttttcacgcggattgcggatgcgcccgttaagctcgatttccatcccggcagtccggagcgccttgatgtagctggcggcggttgtataatggcagtgcaggacagaggcgagctccacaatggagacgcggccgccgtgctcgttgacgtattcaataacctttttggttctctgtacgcttaacatttctctggttttcatatgttttctcacacaactttcttattgataaatttgttcgtggtcttccttttgaccgagcgcgtgtttaagacggcgttcctgcctgcgctgctttcggtccgcccgtgcgccgggctgctgatcccggagaatctgctggcgcagagcgttcccgatcatactgagcagctgagaggctgcgttcatgcttcggctggcatgcgccgactgtacctgctcggcgagcttctgccgctgtatctcggcgtattcactgccgcgttcagccgctgtcgtgtaccagcggaatgcctcagttgtattgacttcggtgccgaggccgtacctgtacatcgatgcgatccgtacagcgcgctgcgcatccggttcggcggtctgctcctcttggagcatcccgttaagcgccttctcgaaataaatctggaaaagggcgggcgcgctgcccgtctgctgatgcaggcggccgagcttgtagtaaagcgcgggcgcagggctgcatgtctcgtaatagcggattgcggccgtgcggttttccggaacgccgaggccgtgttcaaacatccgggcgagacgcagccggatattttcttccggctgtttctgttgcagccatactttggcagcggaggcgtaaagcgcctgcatatcggtttccggcagtattccgccgcgctgcatctgcgcgagcgcataggcggattctgtggagaggaagccgccgcagttcaagcagcttctgtacagtgcctctgcacggatgggatcggctggaacgccttcaccgtaccggaggagcgacgccgcgccgaaccggcaaaacgcattttcggtgtccttgagataccattccagcgccttggctgtgtgcgtttctgtgccgcgcccgtaacggtacatcgaggcgatgcggtagatgcgctgtgcatccggctgggtgtcgggatcggcctcctctcggagcatcccatccagagcctcgccgtatttgcggtataccgcgtcttccggcaggccgctcttttccatgagctgtgcgatgcggtaggagaggcggggggacggatcggatttttcagcttctaaacagtgttccagcgctttaggaagactcgtttcgacgccgaggccgtgttcgtacatctgagacaggcgcgcgtggatttgcgcttcgggagcctcctgcttgagccatatcccggcggccttttggtaaagcgggtgcatgtcggtttccggcaaactgccgtaatgctgcatctgcgcgatggcataggcagattccgaagcgagatagctgttgccgtccgttaagcagctccgatagagctcggctgccttggccgcgtctgcttcgaagccttgcccgcgctcatacatgccggcaagtgcgaaccggcagtaagcgctgctttcttcctttgtgaaccatgccgcagcctgcctataatccggctcatgctccggatgcaggtcgccgcgctggtgcagcttgccgagatagtaggccgcatgcgtatagccgctgttgtaggccagctcgagatatgcggccgccttgtgcgggtctgtcggaacctgcagccggggaatgtccttgggctcaatgccgtcgctgctttcgagttcgatgccgcagaggtaaatcctgccgagaaaatattcggcgcgcggcatttgcctccgattcgccttgttctcgctggacaggccatgttctgaaacggcggcctgatatgaagcgcctgtgtcgatgtcctgaatgagaaaggcattgttgctgtccaaaagaaggttttcaaagcgcagctttgccgtgagcaggtattcattgccgagacgcaggtcttgttccgccggatgacgcagataatgctgtgcgagttggtatgcggcttcagcgtgtccgcgctgatcggcaaggttgtaccagagaacagcatcctccggtttgttttcctcatagcggagaaactgcgcataccggaaaagttcctccggcgagctgtctgcggccggttctttaggtggttctgttttcatgtttcctccggatggcctgtattcccgaacggaatcgatccgtctggtgtgccgtttctgttcggccgtcagatcgtgcgagccttctgctggcggaatatccgcaatctgcggcggcgtggtttctgctgggaaatcaaaaaaaccggaagtacttccggtttttacatcgcccgcatctaaatccagcgtatcggcctgcagggcacagcggatcacaagatttttgagcatatataggttgctgcgcgcggcgaccgcagagagcggctgaggttcatccgggtgcatctggtaataggattcaagctctttctggtacttgccgtactccgtgagcagctctttgatttccggtacagtactcaagccgtccagcaggcggtctgccatcaccttgacattctgcgggaggaatttgtaaacatggcggcctttggaagctaagacggcttccttcagctcggagagccgctgcgggatttgcagcgcggagagttccgcaccggcgttttgatccagctgtgtaagcagccgttcgagccggtcggaaagcgcctgccggatttcttcacgcggggcaaagaggttgtagcgctcatcccgaaagatctccgatacaaaatcggattttatcgcttcgattgcgttctgcgaaaggtacatccgtgttgtctgcgcgtttgaataggcgatgaagtgcgcgtgggggtgatgccgtgtgttgtggactgcggcaatccaatgcagctccttcaaggggacatgcagctcctttgcaagatcgatctgttttttgacaaacaaatcccgccatttctcctgcccgtcgtagccgagggcatctgcgtctgtgcggcgcagggagaacacaaagctgtaaatgtttcccttgtgtgcggcgatggcgtccttttcagcctcgaggtctgcggtgccgtccgaacagaacaggccgtgctgcgtgacctcgtcccggacaacgccgggacgttctgcaatgtaattcagcataatgcggagcgtttcaggatcagcggcactttccagcgccgtttcaagcgcatgggagagcacctcgcttgcattctcgcgcgtggcgctggcgaggtaatccgcatattccggtgtatcctgaatagccggaaccttttccacgaactcacggatgcgctcgcgctgcgcgcgggtagccggacgggtcgcttttacatcgccttcctcgtccagaccaaaaacatactctgtagcccgggctatgaggcgggaggcgttggcgccggtcggatgctccgcatacgccttatattcacgcgacttctcaatatccggcgatgactccaagaagcgttcgatcgcgtccttttgtttctgtgtggcgggcctttgttcgtattcggccgagaagttcagaaggacggattcgcgcgttgcgatatagttgacaagacctgccgcagcctccgggacaagcgcatatttggatgcagcttcacccgggcgggcgatgtgaaaatatcgggcgtttacgatgagacgtgccccgggcatgtgcttgacctcccttttggaaataaaaaagagcagtcaaacgactgctcccaaaataagctgtatcaaggttccgtttcgatctcaaattcttccggttctagtgccatagcttcttcgttctcatacgcctgaaggatactttcaaatttttgctcgaggaaaggaatatcctgcgtagctgtttcgaaaatgtccttcatttccgtgtaggcatatccgtgcgcgaagtgatttcgcatccctttaatcagccgccacggaatttctgtagtcgatgtcttgtgaaaatacctcatagctattcccaaagcgtttgatcgtgtttcagatattttcacagtatgctttcatgtgctgaacaatggatatatctttgctgttatacatcgattttcaccctgtccttcaaataagataacatgaaagacttccggtaggggaaatccttctcgtcttcaatggcctgcatggagatcatgtcgatcgatttgccaagacggcttgaaagatactgccttgcccgctcaaattccagaagaccatggatatttttggaatcgatcacaatatccacatcgctttcaggggttgcttcatcacgagagtaggacccgaaaaggtaaacggctggaatttgaaactcacggctgaaatctctgagtaccgcaataagttcgctttttgtatatacggtttcagtcatagcagctgccatcctttcgcgaaatcctgttcaaaactattataccgcaccggtggcttcgattcaaaccctttgcaaagcacagggaaaaagcggaagtacttccgcttttacgcgcctccggcggtgccgaacagagcgtatttgtgcgatgcggcgtgcgttgccagatggtagcgttcattgccgcatttatacaggcaatggccgcggtttggaatggcgataatttcatactcccacgatcggacgttcagagagcggcagaactcctcggggacgcagtttgttccggggtgaaacaggaaggtatgcgttggaatcatcatcagcggctttgtataggtaatgactttcggcttaagaagatcctctacgttctgggagccgatgcagacgccggaattctttttgcggccgcgtttcataaagctgttgatgtaggagatcgcaaccttgttttccacaaactcgtgcagctcgtctacgaacagattacagtcgccttccactaaaaatttgtggctcataaaggagaagatgtttagaaacatgccgtttttcaaattttcgtttgtgttcagcgcgcttttcagaccgaagtctatgaggtttgaatttgggatgtttgtatggccgttaaaatacttggaggttgcaccgacgcacatgctgcgcaggccgaggccgacgatttttagctggtcaagcgtgtacatgatcggatggccgtctttttccgacagtttaacggcctcatcatagctttctacccgttcttcaatgatgcggtacatatcagacaagatcgggtaatcctcgggacggagcttggaaaaatctgtggtgggtgagatgcctttctgccggtaggtttcctcgagcatgatttcgatgatgtccagttcgctttcgctgaatccgcgggtgacatagaaaaagtctcgcaggaaagcaacatgctgggaaagtaggttggttttccggaatgcggagggttcgttctcatcttccggaagctctgaatcataaaaagatgaagcgggttcagttagtcttcgcggctccaatacattgattttatacctgccgctcatggtgtcgatgtatgtgccgccgagagattcaacaatgtctttatactcgttgtccgggtcttggatataaactttctttccggcaagaacgcagttaatgatgatgagcttcatcaaatatgacttgccctcaccggaattgccgaggatcaggatatgaccgtttgttttatcgctggcgcgttggtcgaagtccacgatgatattgcttccgttctgatcgcggccgatatagaagccgtgcggatcggatttgccggagtaggagaagggatagagattcgcgacactgcttgcaggataaacgcgctcaaattccgtgccgaagcagttttttccgttcggcttgactgtgttatacgcagaaagctggcgcagcctgagcctgtccacgatgattttgtggcgggaaaggaggctttgcacctcgatctgcttgttctgaagcccttcgtaagtatctgcaatcagttcgatgaaaacagcgcagtaaatgaatttctcttttgtccgctgtgtttcgcggattacgcgggaaagagccgtcatttgttcctcggcttcgatcttgtcaaagagcttccaagccgtattccgctgcagggctgtgcggttctgtgcatgctgaaagatttcgtttcgctcgagttcaggcatctggcgtgcatacatgtgcagtgtcacgccgtccatttcgccgagctcgtgcagtacggcgatcgcaggcgaatccttctcaaccgtttctgcataggatcggatcgcccatacacagcggtaggtgttgccgagaatataatactccgcagattttcggaaagacagaatccccggagcgatcagctccttatagcttttgatgcggtatgcttccagttcctccggcgtctgcggtacttggggcttatttctcaatcggaacattttgaccctcctctaggtactgtaaaccatcccagtttggaattatttcgctatagatgtcgccgacatagtaaacggcaaacaggcgtttcagcgcttctttatcggcgatacggacatggaagcgctgctcgcggatcaactgcatagtctgtgcgatgctgtgctgcgcatcctcaagatgcgacacaggataggtcagcagaatgataaactcgcggctggtattcatccggatattgatttcatccagatattcaatttcctgcacgcacaggcgtgcgatgatcggattctgcgccttttccgcgagcgcccggtagtagcgcttgttgttctcgtagctctgtgtcgaggaaatgcaaaggaactgtagctctgggacgttttcaagaacgacctgcaaattgcggatttttgcgaggatttctgtgcgccctaaaacagagatattgtccggacggagcagaagatacacgtataactgaccgtcatccccctcgatggcgcaggaaccgtcgtcacttatacgaagtggaacaaactgcttgatgtttaaaagctgctgtgttgctagtgccgctttgttctggcttttattcttatttttggggtcgcgtttcatctgtaccctcctttgttagaattggctccggctcgccccacgtgtattcgagctgatccagaaaaaggtaattgatgtaatcccggatggaatcagccagcgagcgttcataacggggcggggtgagtgtcaaaagcgtataaaggatcgtgataaccaccggaatatagacaaaggtcaaaaagaaaaccagtacagataaaaccagtgccgctataatgatggtaatatttacgcctgtccatgcaataaacagcgttttctttttcaggtcagccggatagaaaaaataactttgatcgttttccaaagaaataccgcctttcttaacgtgcgaattgtcttaccagcgtgaatacggacgacgtggtgtgtacgacggagctgatgttgccgcgtgttgaggtatccagcccaaacatctgcgcaatacgcgggacttcagccgcaacaagcatcaggccgagcccaaaatataggtttgtggtttcggcatcctgcaacataatcaatgcaagcaaatagagcaggttttgaacaaaagctgtaaagcaggttgcggccacttgcttgcaccatgcgctgaaaccgtccgtatatccgcgcgccaaagaaagcatgtgcagggagccgacacaaatctgcacaagaagaatcccgccgcgcttcaggttgccgaaaaagattttgaagatggcccatacaagcacgacaagctgaatgagcgcccaccagttggcgttcgtgttaaaggctgcgtcggttacgtcggtcatttggaagccgtcttgcagctgcttcagaaacgaccatatgccgccggtaagctgtgtggaggggagagagccgtacacggactggaacatgctgtcgatcgcgcccttggcgagatcggatatagaggcgctggaaccggacatagagccgacggcggcagcgcgaaccgagctgtaaatatccatcgaaaactgaaagagcagaaccgggatggaagaaaaggtcaaaagtgcgatcagcagccgcagcatattcatgccggtgcctagaaagctgccgcctccgccggtacggtaggaaacgccaaaatccatgactgcgatgaccgcgccgagcaggccaagtccccatgcgagcgtactgaaaaaaccaagaatggaggatatgacgctgttgctgaaaagatcgacggtatacccgttgacctcatcgagcattgttgtcgccagtgagacgatctgatagtagacgtaatgatagatttcttcgagtgaggagcttgcaaacaaggagaatcaccatcctttcagagtgttgctgttaccacccgatgattccccatatccatgaaggagccgagaggcagataacgaggcagatgaaaacggcgagaagaataccccacttgagttctccgccctgatgatagtctttccaaacaaaaacgccacgaacgatcaagacaaggagcagaacgccggaaataatatacaaggcgatgtttccaatgcctttaatttccggctgtacctgcgacttcaatatggcttcaagctggccggagatggaatcgagaatagtaaatttgttcatgtttttctttcctttcctgtttaactgactgttaccgtacagctcgcggattgcccgctgcggctgtatacggttacggtggtagttccggcggtaaggccggtgattgtgacgccggaagtatcggagccggagagctgcacgacgctgccgtttccggatacccatgtagcgccctcgttgtagagactgcttggagcaccgataatgttgatccgccaactatcgccagccagtatgctgacgctgtaggtgtccagagagatttcctgcaccactggttccggcgtcggctccggtgttgtttcgatgaccggagggcgcggcgtgggtgttggctttggtgtaggcgcttccgttggtgaaggccgctgcggagcagtagatttgtcggtagaacttcctgaagaaccggaactacttccggtttgcggttcagtagtttcaggaactgctgccggagctggttcctgtgtcggattcggtgtgggctctggcgtaggcgatggggttggagaaggggtgggggttggaacgtcctcacgcagaatgattgtgactggggttgattcgggagatgccgaaggttcagcttcttcagattcaaacagcacggccagcggagaacgtccgctccggttgacttctacaacctgccagatgataccgccaacaacaaaaagcatgatggctgctcctataagcaggacttttgatcttctattcatggttcatcctttctatgtggatttacaggaatgcccgccggggttgtgaccggcagcctgcattacaaggaaccggcggattgctccgctggttcctctcactctgcatggcaaaaagcggaagcacttccgctttttatgttcaggaaaaaaagttaataatctcgtccaaacattctgcgaattgatcggctgacaccaccgaaggctttgttatacaggaaaatccacaacaaaattaaccacggaagaagcatcccgataagtttccgctgttcgctgtacatatcgcaagccatgcaaatgacataggtggcaatgctgatcgaatccagcaaaaaaagaattttgcatgctgttttaaatgtttgcttgttcattgtgaaaccactccaaattgaaggtaagattaaattttacgttctgcacgagatgtggccgatgattccgctggcctccgtcattctgcgcggaaaagaggaattcagttccacttttccttgatttttcacgcaatatcccacgcctactgattatcgtgcgatttgtagagattttatatccccttctcgtgtaaatattgaacgaaatacatcgttcgatttattgacattttcgttcgatttgcgtataataaagacaaaagaacatactatacaccatgaaggaggcgcatattatgatcgtaaccgcaactgaattcaagactaacctcggcaaatatctggaactggctatgcggcaagacatcttcattacaaaaaacggcaaaaacattgcccggctcaccagccccactgtcaataagctagcggttctggacagcctcgtgggaatcgtcccaaagacggctaccgtggatgaagaaaccatacgagaggagcggctggccagacaatgagaatcctgatcgacacaaacgtaatcttagatattctgcaaaagcgggagccgttcttcgcggattcctaccgggtactgcgggaagtcattgaaagtgacaccgagtgtctgatttccgcatcttctgccaccgacattttctatatgctgcgcaaatcccttgggtctgcacaggctgcaaaagatcagctggagcagctcgcccagcttgtgacatttgcggatgtgcagggaatggatatacacactgccctcatgcgggcaatgccggactttgaagatgcggtagtggatgccgtggccgaacgtagcggagccagctacattgttacccgcaatataaaggattttgccggttcggtagtacccgctattctccccgccgatttcctgaaaaaatgaataccatgccgtaacccgtcacagggcgtcggtatggtgttcatttttcaaaagagttccagccccaatgggcactttttaaatctcgtctcaatcaccttctttacaggcaggccgtgtattctgatttaagaactctttcggatcagaaacacatagtttctgctttgagagctcgtttcggatcacaaacatatagcgggcatccatttccggtgacgcatactgctttacttcatccatcgacaggccgcaggttaaaccgaagcgaatttcttccatttggtgtacgttgtaccgcttatcggtatataacgcaacctgattgtccggacaagccgcaacgatagccggatatgatctgactgagctgtccggcggtgtattccggatcagcgaaaacagaaaactgttcccgactgatttgcccctgttcgaaaaagcacacagctgcatccaaatccgaaagagtttccctgctgaagctgcatagcctatatttactgcccttgatctcattgatttttcgcacaagctgcaaattcctgtaaagatggagccggaatatgaaaacaatgaaacggagcagatattcgagaatatagctgcctgcaagtatgaatatccatttggcgaaagggacttttacgaactgtgcgatcaaggcatccatgtccggcgtctttataagctgcccgcaacacaccagcataacgggcacagcacagtaaaagaacgccgttacgcgcacaatccatagggcggcaataaaaattgtgaagccccaattatattttgcagttaccgggaagctctggaagaaatccctccccataacggcaaaaaagataataacaaacgccagtattaaaacaatttccaccattcttcactcctgatttttcaaccgccattttccgggcgtagattttcccgcagccattactgtgcgccgcgatttgcacggattttggatcgaacgtagtcatccggggataaaaagtgatccataaaatttttgtttgattccataatgttaacctccttgttttctaccggggttgtgaccggtgatcccgcattacaaaagagctgtccgaaatctcgggcagctctttttcactctgcatggcaaaaagcggaagcacttccgctttttatgctttatgccttttgcgccgaaataggagaacagtgacgataccgctcaaaactgcgctgcccgcagcagctgcaatcagaggagaggggaaatctccggttttcggcggcacttcgatgggcctgttcggaaacagtgcgccgggcgttgtttcgaatacaacgacctgtccgtcctctgtgatttggaacgggtagtaagtgtcgtcttggataaagccctgcggcgctttatcttcgtggatcagataatgattgtgaagcaggtttttcagcgtatagacgccttttttcccttcggccattgtgccgacacgtgtatcggttccggctgtataccggccgtccttgttcacgtcaaggtagatgccaaatactgcgccagacagcttatcgtttggatcgttggcattaacttttgtagttgttaccgagcctcgaatcggtttattggggaacatcttgccgggggtcgtctcgaatacaacgacctgtccgtcctcagagatttcaaaaggatagtaaatcatgtcctgaacgaatccttccggtgcttcatcctcatgcaggaaaaagcggccggacaggatgccgtccaactggtaaacgccggtttcgatctcgtccagtgtgccaaccagaagatctgtttctgcatcatacttcccgttgccgttggtatccgcatacacgccgaacactgcgccgctgattttgtcagttgggtcttcaaggttcacctttgtggtcgtgatcgagccatgcagcggatgtacagttacggtctgtccctcgtcctctaggtctgcgtgtgtggttagctctatgccatcgtggtataagctctcgaatacgacaacatcggtatctgtgtgcaggaaaacgccgttgaatcggaattctacttcaaccgtgccggttggcgcttctgggatgaacgtcgtttctccaagtacggtgtttccttcaacgtccagaaaaggcttgccggtggccttgtccatcaggacgccggagaccgtgtattctcgtccgggcttgaggtcttcataagcgactgtatcgacaaggacgatctccttatgggcgatgatctccttactctcgtcttcaaactgggccgttgtaccgattttcgggacgcggacagtaacggtctggctttctgcctgaaggtctttgtgctttgcaatctgtgtatttgtttcgacacggtacagctcgtcaaatacgactagctccgtattctccttgagctgtaagctgctgaaggtaaacgtcagctcgacttctccgcaaatgcctctttcagcgtcttctgcgccgttttctgtatcaggcgggttgttaccctcatggggcgtttcaaggggcttctcgagcgtttcaggcgatgtgctgttgtctttttcactgcttacagaatcttcgcgtttatccggtgtgggttcgtccatctccgcaccgtccgctgtgtcggcgtcggaggtgtccggctccgtaccgggcgtatccggatgatcgggggcgtcttccggttcttctggtttcgtgtccggtgtgccgccctcttgaggtgtaaaaatggtttcggcagtgaccggcttaccgtcaaagtcaaggaaaacctcgccggtggccttgtctatcaggatgccggttatacggtactcgacgcctgcggtaaggtcactgtaagagatcgtatccgtgatcgttacgtcgtctgcggtgagggtagttttaccgccaccctcgacaacggcgattgtgctaatcttcggattcttgatttctacagtctggccttcagcttcaagctcggcgtgtgcggcaagcagcagaccgtcatagtagagatactcgaaaacgacgagctgcgtgccgtgcaggttgcttgcatcaaaggtgaattcgaccgtcaccgtgccggttggctcctccggggtgaatatcacctcagaacggatttcctctccggctgcgtcgaggaatacctcgccggttgccttgtccatcagcacgccagaaaccgtgtattccttatcaggcttgaggttttcatacgaaacctcgtccgtgatcgtaaccttgccgagcggatcgacgcggtgcccgtcctctgaaagcgctgttgtaccgatttccggcacccgaattttgacagtctgtccttcctcgtcaatatcggcgtgcgtcgtcaactccataccttcccggtaaagcgtttcgaaaacgacgacgtctgtatcctgcttaatatttaagctgttgaacttgaaaatgacatcaaccgtaccatcgcgggactccggggtgaaagtggtttcggctttgacttcatggccgtcgaaatcaaggaatggcttaccggtggccttgtccatcaggatgccggacagcgtgtattccttaccgctctgcaatccggaatagcttacagtatctacaatgacgacatcatccgcgctttgagtatcctttgcgccctcgccagaattagctgtagtgccgatttcgagcggggcgttatggaacttcacttcggctatgccgccgtctgacagggtgacggtctgtggggcgggcaacgcatagccgaaggtttcttcggtatccagctcctcgacacggtactgatatttggtcttgccctcgttatcctcgaagatcgggagcgtttcggtcagaatcaggccgttggcatctgttttatagaccttgctgtagttgtccttcaggcgcgtaacgcggaatgaaatcccctccactttaccggtgtccgaggtcttgatgatcttcagttggctatttttcagctcgtttaaaagctcgtaactgtaggtttttccattttcagctacgacaacttcaaagtcatcaacagtttctcggccagcgcctcctttgctctgatgcacaatgtatgtgccgcagggcatgtctttggtaattgcatatccggcagcgttggtcgtgattgtgtcgcgttcagcttcttttgcggctgcataactgcctgcggattttaagtagacctgaaattcagcgccggattcatcggcgggagggccgttgagtacctcatactgcttatgaatctgcacttttcctttgataacttgctcttttactgttatctcgattttattgtgttccagactgtagtttccgggttctgcccctacgggatatacggtactgtcaatcaaatatccgttggacggcgaaatttcgcgaatcgaccagttatcgccgcagacgtacgccttcgtcgtgaactggccgttcgtgtcggtcgtgtactgatcgatcaggtcattgccacggtacacaccgtagaccgcgcctgcaagtgaggcgtcgccctgcgccgtgccggtcgagctgtcgcgcttcgtgaccgtggccgtccactttttgaggacgttcgcaaaggaaacagtcgcggtctcattggccttgatcgtaacggtctgcgactgcggctgcacgtattggtcggaggtgagctccgtcacggtcagcacagtgccgtcctgcaaattcgggatggtgatggtgccgtccgggccggtctgcaccgtagtgttcacgccgtcccctgtgacgttgaagcgcacgccggataccacaccgtcctccgaggtcttgacgatctttaaggaaccgttcatttcgacgttgacatttagagtcatagagttagggtcacggctggaaaaaccacaagtgactacatcctgttcaacatcatgttcgtaataaaatcccggtcctttatctataaagtctcgatctacattgtacgcaaaagatacaattccagtaggattaggatttccttttgcagtaagtgtaaccttattgccttgctttgttactgatattccggtagtgtttacgagggggatgtctctataactagccaaagcaccagtcgtatcggtcaaggtaactgtctcgccaaccttcattgttacagtctgaccggcaatactgggtgttgtataaaacaggttgaccttttccatgacagcctttttaaaggcgttgtaggtagactgcgaggcgatgttatccatgccgcctacggtgctggggatcgagacgctggatgcaccgataaaactgccgccgaagtcatggatagtttcccagataaggagctgcgtgtaaaactccgccatatactctgcggatacgtcaatcgtatcccagttgtagtttacagcgtttgtgccctttatattggcaacatttttatagcggccccagtagtcgatgagggtcagtcgatcctgttgttcttttgtcaaatcctgctgcgtatagccgttgttatcgcctaatcccagtgcaatgccgtgctctacacagtaggctacatttccgttgatgcgtttgccgccccagccgttcatatcctctacattcgtcttataaccgatattcatgatataggtcgagcgggattcggtgacggtgacgttgttcgcatagaaaatggggggattcagcccggcttcttcggcgatctcggcgagcgtcttatcgatagcctcgcggccgtcgatcgtgcgaagctggccgtcctcgccgatatagccgccgtactgctcgagaagctcctcaaatttcttctcggcgtctgtgctgtcctctgtgatatacgccatgggatcgaccttactgccgtttgagagcacctcgaagtgcaggtgcgggccgcttgagttgccggtgctgccgacgcggccgatctgctgtccgcgcacgaccgtatcgccctgccggacgttgatttccgaaaggtgtgcgtagagcgtcacggtgccgtccgcgtgcgtgacctgcaccatgttgccgtaggaattgttgtctcctttcgtcacgatgccgttccacgtctgcgttacggtaattgtgccgtcgtccgtggcgacgaccggcgtgccggtatctgcggcaatgtcaagcgccgcatgctggtcgccgcagccctgcgtgaccgtgaagttgtccggcacaggccaagcatgcgcgccaccgagctccgattcaattacggtgaagcccggtacatagggatcctcgacaggtacagcctccggcgtagccgtgggcgctgttgttgggactgctgtaggcgcggagcttggctctgcccctacctccggggcaggttcctctgtgggtgttaccgttggcgcggccgtaggggcggaactcggttgcgaatccggagagggttcctccgtgggcgctaccgccggaacagccgttggagcggaactcggttccggttctgtctccgggacgggttctgtctctggcgctgtttccgaagtggtgtccactgaagccgtcaccgccggtgcaacctcgtctgcgaaggccgttaccggcagcgctgtaaagagcagcaatgccgatagcagccacacaagcggtttcttcattcgtttcatttccattgtcctttccgaaaaaatatctatatgaagaaagccgcactacatcgtaatgcggcctcgattgcatgaaaaagaggattgacaaaaatcaatcctcttttgtacggtattttgttttaatttagaacaggttctctttcttcaggcatttagcgcttccatcagggcggacacgtcatcgaacgggccatagctgtcctcgtccttttcggcagcatccatagcggcaagtgtcgctgtattgggcgtattcttgtttatctcaacgagatactgctcgtgggttttaggttgattctcaataaatcccgacaacaacatattcacctctctctttcttgattcgcctaatgatgactcggctttaagccaatccacagtcaaaaaaattgcattttcatcgtgttatcagtaccactcgacggtgtactttgtgctaccgtcagaataatacacatccgaaattctataaccagatatcccctcgttaatgatcttatcgccccacactgattcagcataatcgtaagctgcaacggcactatcaaacaaaccgtcatagacctgcccaccggtgatgtacggttcctccggtacaggctccggcgtcggttccggggtaggagcgggcgtgggggccggtgtcggcttcggcgtaggcgcgggcgtcggggccggtgtcggcttcgctgtgggtttcgccgtaggctttgctgtcgcagcaggcttctcggtcggttttactgtggtgctgccgccagaactgctgccggaggagggtttctcagtcggttttgcggtgggctttgcagtcggcttggacgaggaaccgccggtgctcggcttagacgagctgccgctcgacggcttttccgtagcggcaggcttctttgtggccgagggctttttcgtagccgtcgaggacggcttggagctgctgcccttgctgccctcatcgtctttcttgttgtcgtcggatttgctcgattcgctcttgccggattctgtcttgccgttgtccttatccttgctggacgctttcggagaggccgacggctttgccgatgggctggcctttgccttgtccttatccttttcatccgctttagggcttgcggacggctttgccgatgcgctggccgacggcgaggccgtcggttcgctttcagtcgatgcagccgatccgcaagcgaccagcccgccgatgagcagcgtagtcgcgacgatcacaccggctacaaggccgatgatctgctttttctttttgctcaggttgttgaatttttccttcatagtaacttccccctaattaaatatagacttaaatcgaatttgtgtcaagaaaaaagaccgctgaagcggcctttttaaaagtgatttttacaatattttcaatgaaaactattatggaaatgtttcttggactattttttatctttggcttttgcattttcctccaattcacggaattctttaagtacttggagagaaaaaggacggatagcggaaacagatcgattatcctctttttcgattggattatagattcctaagtctacatcgagtcgaaaagagttgctctgcttgtccttggtagatacaatgaagaagccatcagcattttgaactttaatccgttcttgaaaatccggatcggaatacagttgggataatctgaggactcgaatgctttccaaaaaattgatcgtaaatataatttcaagtccaaaccatataataacaagagcaaccagtagcaaataaagtaaactggaattcacggtgatttccttacaaatggttaataaccaaaaaccgaatccattgcccaaaaggaaaccgcaggaaagaagctgcttaaacgtaggcatcaaacagcgtttaagcctttcgtttggaatagtttctattaacggcagacagaaatgtttctttaatttataaaatacatatattgcaagaaagatttgaataaggataacgaacaagatcaagatgtaaggctgaaaagatgccaacatagagaattgaggaataatgtttgctaaatatgtcagcatggtttttatggacaaataaaataacgcgcccattagaagaaaagcaatacccatcaataaatttataaagaataggcataggttcttcttgttttttagtatggagaacagtttatccgctatgaaagtaaacacatcaatcgcgccgataagtgtaaataaccacatgaatttcccctttattatattttaagtgcggttaaatttcaataagaaatcagaataaatgggattaattattttagtttagtgtatcaatatcggttccttctttcaatttcttttccaatgtgtgctttacttctcgacctctgttaaaatctcctttaccgcctcattagaagctctaatgatctcctcaacagtgaactccctatagtcgctgtatttactgaattttttgaggagccaatctacgccagttaccatatctttccgcttatccgccataatcgcacctcgcgtaaataatgatctattcggccattctttcagcaatttcttgaaatacagacttcatgtttttccttgctgcggcatttttcctttggacaatatactgctctatggtattgattgcttcggtgagctgtgctttatcttgtacgtcggaacatacactgggattgctgacaagtgtttttctaaaatcacccaaaatttgaagtgcttcttcgacggtcatttcctgcttggatgtgtcacgagcccacctcaaaaaggtgtcctgcgaaataccgatcattttcgctgctttttttgatgagagcttgccatcgagccatgcggccttgaactgctcgaattccttcggtcgtggtttcggaggacgcccgaaacggacgcctcgttttttagcggcaatcatgccttccattctgcgttgcttttggatagaagcatacaggttttctacctcgtgtattccaacttcaacgcctttaacaaaagcgatcgaattggacatttgctttttcattcgcttcgcctcccgtaaattctgtgtgtgattctaaaattgcagcctgtatttcagcctttgaattattgtctttggagagattcgcagtgtattcagacagagaatgtatttgttcagatagcaaattagataaagcagaagactggcgtgtgcttgcagtgagaaaattaactccaagttccaactgtgtaagttcttcggttactttatcgagcaacgccgcatgctgtgattcaatggatttcatgatttcttgatacgtcttgtccatttcatcgcttttttctgaaagtgcctgtagatctttttcgatttcatcgagatactgttggtgccgtcgattccaaaaagaaaatataatgtcactcaacgcaacgagtgcagcgcaagctatcagcaaaagtattacaacatcaaggacagttgggagttcgtctggcattttattgcctccaatatcgttttatgttcgctttaataggaaagcggaagtacttccgctttttatacttcgttttcgttgaccgtatcaaatagatttacacgcccgtttgttttcttaacggcttcgacggctttaccgcgcatcttgctgtattcatcttttgacaaatcataatccaacgcggtaattcgtgtgagaagatttgtttcgacggcttgtttgaaaagcagagagttcaaccgcgaaacagcactattcacgattgcttccatttgctttccgtaaactccacatagataatctgtactgagctgactgcttaaaaaactgaaatagaaatcgattgctttttcgatcgcagagctgcggccaagggtaggagataggttaagcagattaacaatcgcatccagcttctttgtatcttcgtcggaaagataagcagacactctgtttttttcggttgccattatatacttcctttgctgagtagttcggagtagtgccacttttggttccacctgataatggcttgagagctatgaaaagcagcacttttttaaaaaggtggtacgtaaggtagttctaccggcgaaaaagtggtgccacctttttttcgtggaaaacccgcacactgtgcgggtttgtgaagcagtagcaccgcaaggtggtgctactgctttatcctgcattctgaaaatgcaccttttggggccattttcagaggctcggggcagtgatccgcgcactgcgcttcgtgtcaccaaaaacgcctctcggacggctccggagtgggagtgctctctgtatattccgaagctgtagaatggctgtcaaacgaagaatttgcggcagattcagcatcttctgcggtaggattttcactgctttcctcgaaatccagcgcagaaagcgacgctgtttctgcgtcggtttcgctgtttttcgctgcggattttggcttctttttttgtttcggcagctgtgctgtgctgctgaaatcaatgtattcacggacgggcttcggcacgatctggatgtattttcgctccaaaatcttagtgatttctgcgtcaagatcgatgcctttctgctccgcatatgtacgcatcgctttaactttttcggcgtcgaatgcacacgcgaacacgccgttcacaacctttttctccataaaaacacctcaaaatctttaaaattttcgcgcggcgcgtgcctccggcacgcggttattagtaaggaaaaaaacagaatcggcccatccgcactactcaaaaaactgcaagggatcgagccggttttcctgatagcggatttcaaaatgcaagtgattgccggtggaatcgcccgtggttcccacgtatccgatcaagtctccggcggaaacatgctgtccgacgaccgccgcgcgctgcgtttgatgcgcataaagtgtcgcccagccgtttccatgatcgatttttacaaagtttccgtatgagtcatgccacgtggatagggtcactgtaccgtccgccgcagcgtagatcggcgtcatcgcaggcgctccaatatcgattgcaccatgtgcgttttcatacatgtgcgtatacggattccagcgggcaccggcggtatctgtgatccaatccttgccgtatggagcgggcaaaggccattgaaagtcgccttttccggaaacgacgccggttgtaatttctttgattcttccgttttccagcaccactttttgggttccgtatgggtgcgttccatcggtcaaataggtgattccgggcagctgcatccagcgtgtccagcctccttcggagagctttgtcttgactacgccgtcgtgatttcccttcgcttcgatcacttcgccgttgccgatatacacgccgatgtggccttccatgcagacggcaaggcccggaatttccggaatggaagcaatatcaccggagatttccgcgctttccaacatgccgtttgcgccaatatcctgaaaaccatttgacctgtagcggatcacaccggtgtattcatcgatccattcgtaggcttttatgagcccgatgcagtcgaaagaaggctttccgctgtacgtttcaaagataaaattcacttcggaatctgtcaaattcgcagacggatcggtgcggaacatcgcctgctgctgacgcaggaaggacatggtaacgtcttggccgtaggctccgtagacgtatccggaaccggcttccagcgcgttcatgcaaaaattgataaggccaatgttggtttttccgtcttcactgttgagattccgaagaaggatcgcacgatcctcatatccggacggcatttgcgtcgataagcgctcgatctgtgtgcgcatatacgcgtttacggagagcccgaaagtcgcctcgattttatcgaaaatcgcatcggaatccgacagaggggagagcttgtcgtctgttacaaagcagtcgagaagccgttcgatctggcctttcagcttgtcgttttctgcaaagagcttggcgtatatcgcatacaagagcttgtcgtttatgcgctctccagattcaaaaatcgcattgaactcgttgatctgtgcggagaaaagctccgatacctcgaagccaagatcggtataagtcattgcgccgcagctgccaagcagcgctgtagagagcagaaaagcagcgatgcagacggcgataaccttctcccacagcctgtgatcggtgagtgtaaccgcaagttttgccgccagtattggactggccatagatcaagcccccttaataaagaccgcgttttttcagttcttcttttacgattttatcgatctttttttctgaccactgggtcaatttcttgctcataaagaaagcgagcggtgcagctactgcaacggaaatagcaatactaagtatcagttgaacgaaaaattctgtttctgacatagaaaatcctccttcattttcatcgtgttttgcaagcgcacaggtatgcttcaatggcttccgggcggttcaaaaaaccgccggacgcggtgccggagaagccgccgaagacggttacgcagctctggcactccaagaaccagcgtccggcgcgctgcacagtttccatcggttcgccgcacacccggcaccgcagcccgcgttcaatttgccggtacgctcccggctgatcgaataaaatgactttcatttttccttttttcctcgctttcatcggtcttttgacataaaaaaagcggaagtacttccgcttttactcaaattccatttcaaattcttcctcgaaatcctcgtccagatcagcttcggactctgaaattttcaaagatttttcattggaaacagaggcttccgcctcctcttgtatgacgccagaggtgtgatcctgcgcgagcttcggattgtctgctgcaatatgcaggccggtttcctgactgtattcgtactgagcgatgctcttgccatcggcggaaatttcgaatcgcgtgtcacttgataggattttccagctttcaactgtcgcgtttgctttgagggctgcatcgctgttttcggccatttgtcggatatgaccgacagccgcatccagcgaatcaaagccttccgtaatcacggccttatcttgttcgatagtacgcacgcagtagatcaagagctcctgcggcttttggatgatccccgccgcctgaagatactgttccaagttcctgacatgccggttaaaggcgtcgttgaccggctcaaagagcttatcgatttcaatcggcttctgcgtatcttgcagctccttgcagtaagctgcgtagcagccggcaaggtggcttttccgcacatccgttgtcggaataccatattgctgctccaacatcgtagaaagcgcgtctgcctcaaattctctctgtgccgaagatttttgggaatccgggctatggccgataagatcatgcgacatctcatggatcagtgtggagagcttttgcgtatctcccagcttgttattgatcgtgatatgacgtgtgcgcgggtcataaaagccgcgaagcgtcacggaatctacatcccgttccttgacctgaatgccgatgttctcacagtagcgcttgatttctttgtaaattgcggcgtgctgcgcggaatcatagcctaggccaagcagcttcggataatcggacagcgggcaggtcgtctgagaaatatcgtaaacactgccagttccgaagcgcggctcctcgtgtgtttccagcataccggctttaatcatctctttttcttgagcgctggccgtccggatcgaacgccatggcgcagagggctttgtgcggaacgtcgtgacgggcatatacacggaaacgctcattccgtgctgtccgcgacgcacccagtagcccatttcattgaaatcggccatgctggcgacgaagctcgcatacgggttttgcctgtagatcaacatcttattgcgcgctgagtagtggcgaaatctgctttgaaagcgaatgaactcagcgacgtcctcgggattgtcctgccatgtttttgccagatcagcaatcttctgattggcttcctcacgcttttgtgcattgtaagcgtcgcgttcttcctgtgaaaaatgattccgcatatcaaacacctcccgtctgagaagtttgcgcgtcgatctgtcttaaaattgcttcccgcttggctccgggcaattcctccagcttgtgcaggatttgcatttcgatggccaagccgggctctgcgcaggattcggggatgtccgcgtaccagagatcgccgaagtcgtcttcgcagactgccagatcatcgatataagcgataatcgttgcgtactgattaaaactcataaaaattcctcctatgaaagattaaaagcggaagtacttccgctttttgatcggaaacggcatccatgcctgtgtgaaaagctccgtagcggagcctagagaggacaaaaaccggaactacttccggtttttgtcaatctgtatcagccggtcgatcgcagtaagggtatcctgcctgtcacgctcgatttcctcttgagtgtgcgttaagtagtacgagggcggcatcccttcttcgatgacaaagcaactgttgtaaatgtaatcgaccttccaaagatatatgcggcgtcgaatatgcttcagcaggaatttaataattttcatgggctgatcctgtcttcttcagatttgatgcttccgtcaaaatcaatgtgtatggttctgttcgtgcgcagcatagctgcttatgacggcatctcggatatgccggtgtgcgtcggcgttcattggcacaaatgcgtacaggcgtccggtgcgggagctgtggcggttaggggcgtgcattgcaggatacagaacgtccagctcaccgctgctgctgcgaacaatgcgcaggccgtttattgcgtagcgctgctcgacgattaagctcgcaaaagcgagcagccgcccgccggatttcccggtgagcggctgaatgatgacttttgatattttcattgagtgcctctcaattcagcttcttttctcggtagagcttgcggatcatggcgtccacttcggcatacgtgtatgtgatatacgggcctgtgtccggctccatgatgaaacggctggaagtacaggtgtagaagccatcgaaattatctatagtcagcgctccgcttgaatgtccgtatgtaggcttcaatttatccttgcatgcctcttgaggtgttggcatgtgcttgacatagtagaagtgtagttcgtggcagttccaaatgcgatttgaaagaattgccgcttcgagcagttgagctctggcgttctcgtcggattcctgtacagctgcttcttcgtgaaaaccggaagtacttccggtttttacctctttacctgtagtgggatgatactcagtcataggcttttcctgctgtgcgaccggagccggagccggttccggtgcaaaagcggaagtacttccgctttttcctgttttcgcatttgaaatagcggtacggctggcggcaatggactgtgcctctccgaagctcatgcctccgttttgtacagcttgtttttcggaggctgtcagcgtctcggatatggtgcgatatgtccgaacctgccggtcggagacattaagcagctcggcgatgcctttctggataccgcccttaaactcaccgttggctttcagctcctcaagaagttgatgatactcctcgtacagtgcaagttttcgggccgggctgtagtctcgggcgccgttggctatatgcagcatgagctgcgcgcgcccggtggatacgccctcaaatacacggcaggggatcgtttcccagtgcaaatgttgtgtgattgctttataccggcgttcgcccgaaaagagcgtgtaccggccgtggtgctcgaccacaccaagcgggttgagcaggccgagttcttcgatctgatcggcaagatcgcggatgctttcttccgtgtcgtcggccgcatacgagtttttttctgccagatcgataagttcggccttaatctgctcgttgcgcgcgacgctggcgttctgctcttgcagccccttgagtgtatccaatccggctgagatatttccaagattcagtttcttcattttgcagccctcccgatcaactcgtccacgacggcctgataatccagattcccgttgcttctcttatcataaacgttgataggttcgcgtgcgtttacagatcgccggagggcgatgtttttgcggacggttgcgcgaaagacgggaagaatgtcctgtgattgaagtgcttctcggtagatgcccgtggttttatttttctcgtccatgacgattaagccgccgagcagccggagctgggggttcacggttcttctaatctcgatgattttctcagccttgagacgcaggctgtgcagcgcgaattcatcggcgatcatggggatcaaaaggaaccgggcatagagctgaatgttttcaagcagcttgtagccctgcggcgggcagtcgatcaggatgtagtcgtaccggctttccagtgcggaaagtgcattcacaaaaagatcgttatagcgaagcccgttgagtttgcgctgatcgagcagctcctcggcgtccataagggcagtggacgatcgcaggacatcgacgccgaacgcagtagtgctgatggcttgctccggattctctccgaagaacatcacttcaaagagggaggggagagacggatcgtataggccgtagtacatggtgctgtaaccctgcgggtcggcgtctacaagcagtacgcggtatccgcgttcggccagtatagccgagatgttgacagcgctcatggtttttccgcagccgcccttttcatttgtgattgcgattttgatagacatttttatgtcctccttatacagtctccgcatttgcgggtaatataaaaaaccggaagtacttccggtttttgacgagaattgctttttgaaaattaaataatttgcttctaagggcacctgactcttaatcagggtgtcccgggttcgagtccctgatggtgcaccaaatatggcccgttggtcaagcggttaagacagcggcctctcacgccgttaacgtgggttcgattcccgcacgggtcaccaaaatattcctccttagctcagtcggtagagcatgcggctgttaaccgcagggtcgttggttcgagtccaacagggggagccagtaaaagttcgcgaatctttgatttgcgaatttttttgtctatcaaaagccactcgctaggcgagtggctcaaagaaaggcttgtgtcgataatgaataacacaaatggtttatcatacacaaagtggaattgcaaatatcacatcgtgttgtctatagtaatctaaacaaatcaggtccatggatttatcaaaaggggaaaattctattccatatgacatttccttatcaagaagtgtgtgattcagaacagtataatattcgcgccaaagtatagaaggaaagtattctataaagataagaggcgggaagtgggagaaatcctgaaagtgctgtgcgactggaaaaagataaaaatagtggaagcggaggtgtgcctcgaccatgtacatatgctggtagaaataccgccaaaggcagcagtatcgagtttcatggggtatctaaagggaaagagcagtctgatgatttacgagaagtacccggaattgaagtataagtataggaatcgtgaattctggtgcagaggatactacgccgatacagcgggaaagaatgcaaagaagatacaggagtatatcccaaagtagccggaggaagataaggcgggagaacagctgacgatggggagtttttaaagaactcgtttacgagtagcaagtaagaaacctttcgcggcagccagaccgtaccaacgtgacacgtgtcgctagtaataaagggctttgcccgtatatgaaatacccctggcacctgaactgaacagccccccatttgttggacagtatgatatactgaataacaagtggggtgttttactatgccaaaagggataccaaacaaacgttatacaccagaattcaagaaacgagtcgttgaggcagtcatacaagagggaattggctatcaggaggccggcagaatttaagaagttcaaggacatggccgtatccaaagttgggagcggatttatctggaagaaggtccggaaggacttgcagtggaacgccgcgggcgaaaaagtacaggtaagccgaagaagctgtccagcaaagtagaagaggacttgcttgccaaagtgcagcggctgcgtgcggaaaatgcttacctaaaaaacttgcaagccttggttttggaagaagagcgacgccagcacaaaaagcgcaggtagttcaaaaattgaggcatgaattctcgctggctcttctgctcacatccgctcaactccctcgtgcgactttctactactctctgaagcggatgagggttccagacaaatacaaggaagtcaaggcagaaattgccgcgatttactatgagaacaaaggacggtatggataccgccgtatcacaactgaattacacaaccatggatttacaattaaccacaagacagtccagcggcttatgaaggagttgggactggtttgccgtgtcagaatcaagaaatatcgttcttacaagggtgaagtgggaaagattgcccctaatctgctgaaccggaacttctatgcggaaaagccaaaccagaaatgggcgaccgacgtaaccgagttcagcttattgggccagaaactgtatctcgcccattttggatttgcataatagttatctggtcagctataccatctccgaccgtccagtattgggcatggtaacttccatgttggagaaagcgtttgagactataccagatggagcagggttaattctccactctgatcaaggctggcagtatcagcataagcaataccaacgcatgctcaggagaaagggaatccagcagagtatgagccgcaagggcaactgtctggataatgccgtcatggagaatttcttcggcttactcaaaagtgagctgctgtacctgcagaaattccagtctatggaccacttcaaacaagaactcattgactacccgaattactacaataaccgcagaatcaagataaacctggaatagtcaagaaaaccgtacacccatgagtaaaaccttaagcggcaaacgggcgatcagcgaagcgagcccgtttgaccagcggcgggagattcagttcattggcagtgttgcgccggcggcggttgtagtaggtctcaatccagcgaaatacgatcttgcgaacctcatcccgcttcatggtggagcaattgaaccggtagaccagttccttcttcagcgttgcgaaaaagctctccatgcgcgcgttgtcaaagcagcaatgcgtacggcccatgctctgccggatggaaccgaactccgcaatcgccgcccggtattcctggctggtgtactggctgccgtggtcggagtgcagtatcagacccttttgataaccatagcgtgaaaccacatcgtgcagggcatcgcagcacaggctggcacgcatatgatgcttcatggagaagccgacgaccgccccatcataacagtccatcacagcggccaggtacagcctgccgtccgcacatttgatctgcgtgatatcgcttaaatatttgacgcctggcttcctggcggtaaaatcccgctgcaccaaatcgtcactctgtgggtcacgatgattgcactttgtcaggccgtgtggacgttttttgcgttgtaacagcccgttttctttgcagagacgataacatttaccgtagctcacgcgaagtgcaggctccacagtctcccgcagcccgcgcacaccgtaacacgggtgttccttcctcgcttttctcagggccgataccaactgtgcatcgaggtctgtccgcatgggccgatgcttccattcgtaatacccttcccgccgcacgccaagcgcctgacaactcagggcgatgctgattccgtcatggtgctcattgatccatgcatacagttcccgcggacgtacaccggttatcgacccgccataaaacccagcgctttacggagtatgtaatttgcctcgtacagttctttgttctcacgaagcaggcgctcgaccgcctgctccgctgtttcgcccggctgcacgccgcgtaattcgccgtgcttcagccgctcttcccgacgccagttatacacggttttggtggataaccccagctgttcacaggctgctctgaccccgatctcatccgacagtttcagcacatcggccttgtattccgcactgtatttttgtcccatttcctatccatcctttcttcccttaggtgtgcggttttattatatcactccaaactaaagggtttgccgcctgccactcacagaccactagctctttcggttgcttgaataattctttaacaaaatattgtctaacttttcgggggcacttcataaccaattatttttccatcgttttcctgccgtcatttgagacatacattctgtactaggctctgtgaacacgaaacgaatttaaaagtggaccaagcagttatgagacaccgaaacattgaaacaacgatagatatctacgctgaagcaacggatcgaaagaagcgggaagcgtttgatagtctatcaaaattggatatcttttgagaaggattctcggtgtcgaaaaattgacaacaaatacattgcgctgacagcaagttgacaacagttttattttttctctgaggatttgaagtaatgtgaatagcggtgaagttgtgggaaaactcttttccacgatgaagccaatcggcggccagagaggccgtgaagaagagcaagaagctgctcaagttcgtgctggacgacggctcgggcgaagaccgcgtgatcctgagcggtatccacgagtattacgagccagaggagctggtcggcaagacctgcatcgcgatcacaaacctgccgccgagaaagatgatgggcatcgattcctgcggcatgctgatctccgccgtgcatgaggtcgacgggcacgagggcctcaacctgctgatggtggacggccgtatccccgcgggcgcaaagctgtactgagaccgataattttgaaaagagcatccttccgcgtgcggagggatgctcttttgacttgcggcatcgaggccaaaggccagcgcccccgatggtaaagcccggcattgcagcagaatcatttcgctgtttcacggaagcccgcgttctcggagataaagcggggaagcgctctcgcttgcggatcctttgtacagggggagacggcaggaaacaaaaaacgggcggctccgggttctgcggattgcagatcccggagccgcctgctataaacacaaacggatggttatgttcttacgcaagtgctgcgccgagcgccttgcaggccgctgccgcgtcgtcatccggcgcgtcattgcagatcacgctgtcgcaggcgagcacggcgccgtcggccgcacaggtttcctcccacgtgcgcatccactcgccgtcgccccagccgtaggagccgaacagcgcgatcttcttatccttgagctttggctcgcaggcggagaacatcggctcaaattcgctctcctcaagctgctccgcgcccatcgacgggcagccgaacgcgaccgcatcaaaattatccatcatggaagcgtcaaattccgcggctgtgagcagaacggcctcggctcccttttccttgatgccctccacgacagaggcggccatggcctcagtgttgcctgttccgctccaataaacgacggctactttactcattgttgtttaccaacctttccagcattttgtgatttatgatacagctacgatgagccggtcaaacgaattgtatttttgaaggcagtcccgatacacgcgcgtgcacttgcggtactgcgcgaatttgcagcgggcggcctgctcatccccgtaaaccttccatgcgccggtacactttgcacagtgcgcgccctcgtgcatgaagccgtagacgtcctccggcgggtagccgaggaacagcccgatctcgtgcgggaaatccgcgctttcgcgcaggcgggcgatcagcgtgcggatgcagtgttcgccgctttccacgggatagccgagtccgctgagaatctgccggctgcgcgcatccgcgaggtcgcgcttcagccgcgccgggcggtatacatagaccaaagcgcggtccgcgtagaatttcagcggcagaacccgcatgccgcggtgtgcaaaccggcggttgaggctgcgtgcgtgcgcgaggatctcctcccggctgtgcatggggcaggtgaagagactgcccgttttgaggccggccatcgtcggcgagcagtgcgcgacgagaagctcctcagacacagcagagcgctcccttcacgtggctttcgagaatgcctttcagcgccgccatcgagctcgtgtggctgcgcgcgatccggatgtcctgccccttggtggcgcagagcacggaacgcagcatcttatgggacatagtgcttgtgaacaggacgagcagatcgggcgagccgacgtttttcaggccactcacctgcttcgggtagattttcgccttacagttgtattcctcgcaaagctccttatagcggcgggtcatacattcgtttccgccgacgattacaacactcatgtgcgcagctcctttcaattggttagttttaactaactatagtctaaaaaagaattgccttcggccgtgccgcttcacccgcccggcgcgcgccccgctcggggactcagcgcctttggcgcgatgccttcggctgaagcgcggcggcgctttgacggcatcctttcgttcgatgggcttattataccaatgaaaacggagccctatccgctccgaaaagacgggataaggctccgttcagacaatcttgcgcccgcttattccgcaggctttacagcggtgtgtgcgcggtattcggccggcgtcgcgcccataatgtccttaaaggctttcgaaaacttgctgccgttgtcgtagccgaagcagccggcgacctccagcacagagcggtcggtttcggcgagcatgagggcggcggcctccattttctgccggcgcgtgtacgcgaaaaaggagacgccgtacacgagcttgaaactggttttgatctgtgtgccggagacgtggaagtgcttggcgagctgctcgagcgggatgcggcagtccatgtgtgccgtgagatatgtgcagaccgccttggccagcgagacctgcgcgcgggatacaaagtgctgcttggtttcggcctcctccacgggcatggcgctcagaaataggaggagctcgagaatcttcaccttgaaatagcccttgcggatgctgtcgggcacgttgtacagctcggaaaagatgtgcgcgatgccctcatttgagcgggcgatgaagcaggtattgccgctgcagaacttttggcggagcgcctgcgggctgacctccacgtcgtcgagaaagcaggagaggcaccgcggtgcgcggtcgagatcgatgcggatgcggatgccgtggtaatgcgcgagcgggaaataggcgctgccgctgatgtcggactccatcgcgacggagaggtcgccgggcgagaggtagcagaactccttgcggaaggaacgttcgatccgcccctcgcggcagtgcgtgatttcaaacacattgccggcgggggtgcgctgcatcgtatatttctgcgcgtgcacgtcgtcgtagagaatctcaatgcccgggaagatcgggcagcccgccgcgccgtccggcacgctctgccgcgcggctgttttctccgcattcagttcctgcatttctgtacgcataatggctcacctgtaaaatcgctggacggttcgcggggcggtgtgcgccgccgcggatctcacttgtgtaagaatgaaaacatgcctttcctctcgtacggcgcctgctcgacggataagatcgtgtaaccggtttcaccgatgacggcgcgtagcttttcctcgtcgggcgcctgctctgcaaggatgacggtctggcccttcgtgtgcgaggacgtgactttcttgacgttgaacgcgcggcggatggcgtcgtttacgtgcgattcgcacatgccgcacatcatgccgtcgatttttatggtagtctgcgtcataattcatgttcctttccgcttgaaaattttggggtcttggcttacaggcagccgctgtccgtctgggcggccgcaccgccgcatgcggacggccctcccgccgcctccgcgcagaaagcgtcgaggctttcctcgggcagctcggcaagcagagcgtaaacggcggcctgcaggtgtgcatccgagggaaaatgagaggccagtagccggaacagcgcctcgtaataccggctgtaccggtccacagccttgcggccggcgtctgtaaaatgggcgacgccgtaggcggtcttgcggatcaggttcatatcccgaaaggtattgagcatcgtgtgtacgctcgggtttgtgaagccgagcacggcggcgacctttgcgccccgcacgccgtttccgccgccgtccagccttttcatcgtcagcaaataccgtatctgggaggcggtcagcagtttctggccttccatggcttccctcctaataaaaataagggagacgcaagcggctcttgcgtctccctttgtgtcacatcagtgcttgtggcaggaaccgctcatggggcatccctgacaaccgcctccgcaggaggatttgcctttcttcttatcgcgcgccatgctgtaaataatggcggcgacgatcagaatgagtacgaggcaaatgacgattgtggcgatgttttcaatgatccatgtaaacataatgagcgcctcctttcaaagagccgtgcttacttgactctcactgtggctgtgagctttgtggattccttatagggcttgaacagcatgtagatgatgccggccgcgagcgcgagcgccacgatcaggccgatcacattgaggccgccggtaaagacggagccgatctggaagatcatcagggcgaccgcataggcaaacaggcactgatagccgatcgcgaaccaagtccacttcgcggagttcatctcgcgcttgatcgcgccgattgcggcaaagcagggggcgcagagcagattgaacgcgaggaacgagtaaccggcgaggggcgtaaacgccgcgccgatgctcgcataagccgagccggagccgctgtagaggatgcccatcgtaccgacgatgttctccttcgcgatcaggccggtgacggaagcgaccgtcgcctgccatgtgccccagccgagcggcgcgaagatccaagcgactgcattgccgatgacggcgagaatggaggagctgagctcatcctcggagagcatgcggaacgtgccgtccacaaatccgaaatagctgaggaaccagacgaggatcgtggagagcagaatgatcgtgccggcttttttgatgaaggaccagccgcgctcccacatggagcggagcacgttgccgacggtcggcagatggtaggccggcagctccatgacgaacggagccggatcgcccgcaaacatctttgttttcttcagcatgatgccggaaatgatgatgcaggccatgccgaggaagtaggcggaggtggaaacccaagcggagccgccgaagatcgcgccggcgaccatggcgatgaagggcattttcgcgccgcaggggataaaggttgtggtcatgatggtcatgcggcggtcgcgctcgttctcgatggttctcgatgccatgatgccggggatgccgcagcccgtgccgatgaggatcgggatgaaagacttgccggagaggccgaacttgcggaagatacggtcgagcacgaaggcaatacgggacatatagccgcacgcctcaaggaacgcgagcagcaggaacaggacgagcatctgcggcacgaagccgagaaccgcgccgacgcccgcaacgataccgtcgaggatcaggccgttgagccattccggcgtgtttgcagccgcgaggccgtcgccgatgagtaccgggatgccgggcacccagacgccgtaagcggccgggtcgggctcttcaaagccgtagccgtccagtgtgggagcagccgcagcgaggtcctcgcccgtgtatgtaacggtttcggtggagaggtcctcctcgttttcgatgtcgatgtcggccgtgtctgccgcagcgaactgcgcggcgaactgatccagagcagccttggccgctgccggatcaaaggtgtccgactcggtgtccagcgcctcggaaagcgcgtccgcgccctctgcaccggtgccgatgaaggcgtcaaccgcgttcatcgcttcgccgtaggcctcggcgttctcctcatagtcggcggtgccgatgccgaagaggtggtaaccgtcgccgaacaggccgtcgttggcccagtcggtcgcagccgtaccgaccgtgaccatcgagatgtagtagacgaggaacatgatgaccgcaaagatcggcaggccgagccagcggttcgtgacgaccttatcgatcttgtcggaggtcgagagctgtcccgcgctctttttcttgtagcaggacttgatgatggaggcgatgtacaggtagcgctcgttggtgatgatgctctcggcgtcgtcgtccagctctttttcggccgccttgatatcttcctcaatatgcgcgagcgttttttgatcgatgttcaactggctgagcaccttgtcgtcgcgctcgaagatcttgatggcgtaccagcgctgctgctcctcgggcatgccgtgcaccgcagcctcctcgatgtgcgcgatggtgtgctcgacgcagccggagaaggtgtgcatcgggatcgtctttgtgttctttgccgcgtcgatggcggcctcggccgcatccatgatgccggtgcccttgagcgccgagatctcaacgaccttgcagccgagctggcgggcgagctccgccgtgttgatcttatcgccgttcttgcgcaccacgtccatcatgttgatggcgacgacaaccgggatgccgagctcggtgagctgcgtggtcaggtacaggtttctctcgaggttcgtgccgtcgatgaggttcaaaatagcgtccggacgctcaccgatcaggtagtttctcgcgacgacttcctccagcgtatagggagaaagggaataaatgccgggaaggtccgtgatgataacgccgctgtgctttttcagcttgccttccttcttctcgaccgttacgcccggccagttgcctacgaactggttggagccggtgagcgcgttgaacagcgtggttttaccgcagttcgggttgcccgcaagggcgattcttaaatccatctcctagattcctctctttccgaaattagcgtcagctaactgtagtgcctgaaaaaacggggctgtccccggcagaacttactccacttcgatcatttccgcgtcggccttgcggatggacagctcataaccgcggacggtgacctcgatcgggtcgcccagcggcgccaccttgcgcacgtggacctgaacgccctttgtgagccccatatccatgatacggcgcttgaccgcaccctcgccgtgaagcttgacgaccttgaccgtttcgccgatccggaccgctttcaatgtcttcatcgctctttcctccttgattaactgaattgcacggatttatttagaaaaaatcatatcatgatttttcgtgccatttcctcgctgatggcgacgcgcgcttccttgacgtttacgatcacgtttccgccgagcgtcgtgatgacggtcacgtttccgccgacgacgaagccgagattctcaaggtgctttttgacctcggggcttccgccgatctttttgatggtgttttcctcaccggtgtttgccaatgccaacggcatcataaccatccctctttcctaaatcgctgaattagtggtgactaattcaaaagcctaaaagaaagttagctgttgctaacctccaatatcatatgcctttccgccgccgttgtcaagtcctccgagaaaaaaattgtccagcccgtttgatttcggtattctgaccagtatctgcgggggatgaaaagaataagagggcaaaaaagcggagcgcggatcattgcccgcgctctgtatcccgtatcttatatttagaaaaattctgcgtcttatcgtcttatttatagaaagcctagaaagccgcgccgatgcggtgcgggcggtctgccgtgttttcccacccgtgtttctaaatataaagggcaaaagggtgggaaagggggcgcagaggcccgcaggagtggggacattcaccaaaaatgccgcagggtgattgacaagggcgcgcggactgtggtacactgtacgggataaagttagccgccgctaatatatggcggctgattctttcttgttgggttagcagatgctaacttttgcgcggccggcctgtgtgtgcggcggtcagcgcggcctgcggaataaggcctcgctgatgcgcaccgcacgctcgtgatgctcgagctgcgccgcataccggtgcagtccggctgcggaatggatgcaggcgccgtactcgtgcagcttgagctgcgcctcgacgggcagggaaagaaaataggcgcgcgtgctgctgctgtgcgcgatcagcgcctctaaatctgcgtaatgcagaaaaatcacctctctttcgcctatagtttgcggaaaacagagcggaaatacacgaaaaggcggttttattccatgatgatcaacaaaaggctgatcagaacggtcggcgaaagcaagcggtacatagtggggaacgtcctcctgcaatggctctccctgctggcgaatatcgccatgatggcggcgattacggcgttgctcgcaggtcttttctcgggcagcgcggacggcggcagcctgcttgcggcggcgcttgccgcggctgccgccatcgcggtgcgctttgcctgcacgacaggtgccgcccgcatggggtacctttcctccaaggcggtcaagcgcacgctgcgcgcgcagatctatgaaaagctgctgcgcctcggcgcctcctacaaggagcaggtcaagacctccgagatcgtgcaggtggccgtggaaggcgtggaccagctcgagacgtatttcggcgcatacctgccgcagtttttctacgcgatgctggcgccgctcacgctgttcgccgtcctctgcttcgtcaatgtgccggcggcggtcgtgctgctcgtgtgcgtgccgctgatcccggctgcgatcgccgcggtgcagacgtgggccaaaaagctgctctccaaatactgggggcagtataccgcgctgggcgatacctttctcgagaacctgcaggggctgacgacgctgaagatctacgaggcggacggctttaaaaacggcgagatgaacgtggaggccgagaagttccgcaaaatcacgatgaaggtgctgacgatgcagctcaactcgatcacgatcatggatctgatcgcctacggcggcgcggcgtttggcatgattatggcggtgacgcagtacgccggcgggcacgtctcgcttgcgggctgcctgctgattttattgctttcggcggatttcttcatcccgatgcggcagctcggcagctttttccacatcgcgatgaacggcatggcggcgagcgacaagatcttccgcctgctggacctgcccgagggcgcggagaaaaccgagctgtgcccggcggactgctcgatcgcctgccgcggcctgcgctttgcctacacgccggagcgcgagatcctgcacggcatagacctcgcgttcccgcagggcagctttacggcgctcgtcggcgagagcggctgcggcaagtcgaccgtggcgtcgatccttatggggcgcagccgcgcgtacagcggctcggtcacggtcggcggcgttgagctgaaccgcatcgcggaggacagcctgatggagaagctgacctacgtcagccaccagagctatctctttaagggtacggtgcgcgagaaccttttgatgggcgcgcccggcgcggacgacgccgcgctctgggcagtgctggagcgcgtcaatctggcggattttctgcgcagcgaggacgggctggagacgcagctcctcgaaaaggcttcgaacctttcgggcgggcagtgccagcggcttgcgctcgcgcgggcactgctgcacgacagcccggtctatatcttcgacgaagcgacctccaacatcgacgtggagagtgaaaacgacatcatgcgggagattcacaagctggcggagacgaaaacggtggtgctcatctcgcacaggctcgtcaatgtagccggcgcagaccgcatctacgtgctcgaaagcggcgcagtcgcggagagcggcagccatgaagcgctgctgcaaaataaagggctgtacgccaagctgtgggcggcccagcagagccttgaaaactacggaaaggaggcggtgtgagatgcagaaaagaagcggaatgcaggtgatggcgaagctcatcggccttgtgcggccgctcgccggcttcatggcgcttgcaattttgatgggactggccgggcacctgtgcgcggcctcgatcacggtgctcggcggctatgccgtgctgggaattttggggcttgaggttccgctggggcttgcggcggttttcgcctgcgccgtcgtttttgcgctgctgcgcggcgttctgcgctacgcggagcaggcgtgcaaccatttcattgcgttcaaactgctggcgctgatccgagacaaggtgttccgcgcgctgcgccggctctgcccggcaaagctcgaggggcgcgacaagggcgatttgatttcagtcatcacctcggacatcgagcttttggaggtcttttacgcgcacacgatctcgccggcggccatcgcgctgctgttttccgcggtgctgtgcgttttcatcggcagctttcatcccgcgcttggcctgctggcgctcgcggcttacgcggtcgtcggcgtgctcgtccccttcttcgtttcaaaggcgagcggcggcgacgggatgcagttccgcgccggcgccggcgcgctcagcggctttgtgctggacagcctgcgcgggctctctgaaacgctccaatacgggcagggcggcgcgcgccttcaggaaatgaacgcgagaaccgaggcgatttcggccaatgaagcgcgcatgaagcgcacggcgggccgcaatatggcggtgacgaacaccatcattctggcgttcgacctcgggatgctctttgcatccgcggcgctgtaccggagcggcagcgtcggctttgacggcgtgctgatcccgacgctggcgctgatgagctccttcggcccggtgatcgcgcttgccaatctgggcagcacgctgcagaatacgtttgcggcgggcaaccgcgtgctggacatcctcgaggagtcgccggccgtcgaggcggtcacgggccgcccggagatcggcttttccggcgccgcggccgagcatgtgacgtttgcctacggcgcggagacgattctctccgatgtttcggtctcggtgccggagcacgcggtggtcggcattgtggggcgcagcggcagcggcaaatcgacgctgctcaagctcttcatgcgcttctggaacgtgcagaagggcagcgtgcggctgtccggcacagaggtttcggcggtcaacaccgacaacctgcgggcgctcgagagcttcgtcacgcaggaaacgcacctgttccacgacagcatccgcaacaacctgcgcatcgcaaagctggacgcgacggacgcggagatcgaggcggcctgccgcaaggcctccgtgcacgatttcatcctgcggcttccgaagggctacgacacgccggtgggcgagctcggcgatacgctatcgggcggcgagcggcagcggctcggtttggcccgcgcctttctgcacgacgcgccgttcatgctgctcgacgagccgacgagcaatctcgacagcctgaacgaggccgtgatcctgcgcgcgctgcgtgaggagcgcggggaaaagacggtggtgctcgtctcgcaccggcagtccacgatgcggattgcggacatggtctattcggttgagcacgggaggatgagctgatggcaaggaatgtagacgacaagcgcacgcgtgaaaagcgaatggtctcgcagatgatcgcgctgtactgccaaaagaaccaccgcacgaaagacgggctctgcccggaatgcgccgcgctggccgattacgcgcggcagcgcagcgacaagtgcccctttatggagtcgaaaaccttctgttccaactgcaaggtgcactgctacaagccgcagatgcgcgcgaaaatccgcgaggtcatgcggttttcggggccgcggatggtctttcaccaccccgtcgccgccgtgcggcacgtcatagaaaccaagagggaaaagaaacgactggagggacagcatgaaggttaaaaaagttttgtttatcattctcggctgcgtcggcttggcgctcggcgccgtcggcgcggtgctgccgctgcttccggcatttccgtttttgctgctcgcggcctactcctttgcgcgcagttcggaaaggctgcataagtggttcaccggcacgaagctgtataaaaacaatctcgagagctttctcaagggcaagggaatgacaaaaaagacgaagatccgcatcatggtcaccgtcacgctgctgatgtcggtcggcttcatcatgatgcatcaggtccccgtggggcggatcgtcctcggggcggtctggctgttccacatcttctactttatcttcggcgtcaaaacgctcgagaagccggcggaataggccgaccatgccgggcgcccccaagcacgccggagcgcggccgcgcatgcggggcggcctttacgcaaaccttacctgctttttccgctttccgcattgcagggcgcggctttggcgactataatggaagcagaaaaagacacacatggattgcggcgcggccctgcacaccgcagcctgtcggcacgacggcggcagcggagggcaaaaaagcgctgtgcggccgggaaaacaccggccctctatgctgaaaagcgccccgcgagcaggcctccgcctgccggcggggcgtttttgctttcagaaaaatttcaaaaaagtctcgacaagcggcggacattcgtgtatactggtagatgttcgcggcgggtgtgcgccgaaaaatacacaagatattgtataatcggataattatgcaagagggataaaaattctgagagaacaggccgcaggaggaaactgctatgaaaatcatcaagagaaacggctcggaggccgctttcgatattacgaagatcatcgccgccgtcacgaaggccaacaacgccgatgggcagagccgggagctgaccggcgagcagatccgcgcgatcgccgccggggtggaggagaagtgcggcgcgatgggccgcgcgccctccgtcgaggagattcaagacatggttgaaaaccagatcatggggcggaacgcgttcgaggtcgcgaagcgctacatccgctatcgctacacccgttcgctcgcgcgccgcgccaacacgaccgacaaccagatcctcagcctgatcgagtgcaacaacgaggaggcgaagcaggagaacgcgaataaaaacccgacggtcaacagcgtccagcgcgactacatggccggcgaggtctcgaaggacatcacgcgccgcatcctgttgccgcaggagatcgtcgaggcgcacgagcagggaatcatccacttccacgacagcgattattttgcgcagcacatgcataactgcgacctcgtaaacctcgaggatatgctgcagaacggcacggtcatcaccggcacgctgatcgagaagccgcacagcttctccacggcctgcaatatcgcgacgcagatcgtcgcgcaggtcgcaagcaaccagtacggcggccagagcatcagccttgcgcaccttgcgccgttcgtgcaggtctcgcgcgagaagatccgcggcgaggtgctcgcagagctcgaggagctcggcaccacggcctccgaggacaagatcgcgcagatcgtcgagcgccgcctgcgcgccgaggtcgagcgcggcgtgcagacgatccagtatcaggtcgtcacgctgatgacgacgaacggtcaggcgccgttcatcacggtgttcatgtatctgaacgaggcgaagaacgagcgcgagaagcgcgacctcgcgatgatcatcgaggaggtgcttctccagcgctatgagggcgtgaagaacgaaaaaggcgtgtgggtcacgccggcgttcccgaagctgatctacgttctgcaggaggacaacgtcacgcccggcgccgaatactactacctcacagagctcgcggcgaagtgcaccgcgaagcgcatggtacccgactacatctccgaaaagaagatgaaagagctcaaggagggcaactgcttcccggtcatgggctgccgcagcgcgctcagcccgtggaaggatgaaaacggcaattacaagttctacggccgcttcaatcagggcgtcgttacgctgaacctcgtcgacgtcgcgctgagctccggcggcgatatggatcgattctggaagatcttcgacgagcggctcgatctgtgctaccgcgcgctgatgtgccgccacaaccgcctgaagggcacgctgtccgacgcggcgccgatcctctggcagtacggcgcgatcgcccgcctcaaaaaaggcgagccgatcgacaagctgctgtacggcggctattcgacgatctcgctcggctacgcgggcctttgcgagtgcgtccgctatatgaccggcaaatcgcacacagacccgagcgctacgccgtttgcgctcgccgtgatgaagtacatgaacacggcctgcgagcgctggaaggcggagacgacgatcggcttcggcatctacggcacgccgctcgagagcacgacgtataagtttgcgaaatgcctgcaaaagcgcttcggcatcgtgccgggcgtcaccgataagccgtacatcacgaacagctaccacgtgcacgtcacggaggaaatcgacgcgtttgcgaagctcgcgtttgaggcgcagtttcaggcgctctcgaccggcggcgcgatcagttacgtcgaagtgccgaacatgcagcagaacctcgaggccgttttgcagatcatccgctacatctacgacaacatcatgtatgcggagctgaacacaaagagcgactactgtcaggcctgcggctttgacggcgagatccgcatcgtggaggacgacggcaagctcgtctgggaatgcccgaactgcggcaaccgcgatcaggacacgatgaacgttgcccgccgcacctgcggctacatcggcacgcagtattggaatcagggccgcacggcggagatcaaggagcgcgttctgcacttgtaagcgcgcggggccggcccggatacgggcggcagcaaaagccgaaaacaaagaagagcctctgccggccggcaaaagcccggcgggggctctttcccataacggaggggaaaaggtgtattacggagaaatcaagaaaacggatattgcaaacgggcttggcgtgcgggtttcgctgttcgtctcgggctgcacgcggcactgcaaaaactgcttcaatgcggagacatggagcttcacctacggcaagccgttcacggcggagaccgagcaggagattctcgacgcgctcgcgccgggcttcatcaacgggctgacgctgctcggcggcgagccgatggagtgcgaaaaccagcgcgcgctggcgccgtttctgcgccgcgtccgcgcggcctaccccgaaaaggatatttggtgctacaccggctccacactggagacggatattctgaaggacggcgggcgcagccgctgcgaggtgacggacgagctgctctccatgatcgacgtgctcgttgacggcgcgtttgtggatgcgctgaaggacatcacgctgcgctttcgcggctcctcgaatcaaaggctgctcgacctcaaaaagacgctcgcaagcggtgaggcggtgctctgggcagataatgggtaatcaaagaaaggcggaaatttttatgaagaagatcgcgagcttcacggtcaaccacgacaagctgaaaaagggcatgtacgtttccagaatagacggcgacgtcgtcacctacgacatccggatgaaaatgccgaacgcgggcgattacctcacaaacggcgcgatgcacacgtttgagcacctgttcgcgacgtacgcgcgcaacagcgcgtattccgatgcggtgatctacgtcggcccgatgggctgccgcaccggcttctactttttgctgcgcgatagcgtgagccgcatggaagcgctgcggctcgtgcaggaatcgtttgcgtttatcgcggcgttcgacggggagattccgggcagccgccgcgaggaatgcggcaattaccgcgagcatgacctgccgggcgcaagggacgtcgcggcggataagggctgtgtgctggcggattggttgccggagaaaatggaatacgaggcgtaaacgcgcataaattccgcaaaaagggtatggaaaagcagcaggttttcggcctgctgctttttatgttgggattctgttttacggcttctgctttttggactttgaagcgaccgccgcgccggtcaggagaatgccggaaacggatgcgacggcgatccaaagcagaacgttcgtctcatcgccggttttcggcacattattttccggctgctcaggcttcggagacggcgtgacagacggcgcctcggtcgggttcaccggtgccggcgtgggtgttgcagtcggcgcaggtgttgtggtgggctgctcggtcggatcgggctgctcggtcgggtcgggctgttcagtcggattgggctgttcggtcggatcgggctgctcagttgggtcgggctgctcagttggggcgggctgctcggtcgagtcgggctgctcggtcgggtcgggctgttcagtcggatcgggctgttcagtcggatcgggctgctcagttgggtcgggcttttcagttggccgtgcggagaaaacaacctcgattgtgtgtggggccactacatccttaaaggtgtaagtatagctggcatctccttttccgtaagaggaggaaattccatcgataatgatggcatcaatgatataattttcattggctgtgatgctgtaagactggttggaaccatattctacttcggtatttccggaaggcgtaatgctgccgccttctgaggccgtcgctgtaattgtaggattaaaatttgcataaatgctatagatgattggctttccaacaacttcgcctttggttgtcagacggtttacagagatggtgtcgccgttgctgtaggcggtataccaatcttttccgctgttgctgaaagagtacctatcgccaaatacaaaatcggtccgatttccgagatcctcgccgtcgaacatctgcgtgtaagtccatcccttgaaaacccagccttccggtgcggtggcagtgtattggcggtatccgagaccttgggagaacgtgctgtcgccgttgcttcctgttaaagacacagaatcgccgccggcgccggtagtatagtatacgtagagttccgcatcctctaccaatgcagaaagagagctatcctccgtatattggtgttggctggaatttgcagaaactgcggttggaatcatgccgattataaacagtacaagcagtacaacggcaaatttacttttcatatcctcacattccttgtatttgatttttagtgccagaacagatcattatgccgagaagtctttgacctctatttttgaccacctcctatctataaaaagagcaaagatatagtgcacgaatgataaagcagactttttcgttcgggcatgctataatacaaaagtatagaaatagggcggtaaaatgggggtaggatgtagccgaaatcagtgaacgatatttcctacattttccaatcaaaacgaaaaaaatatttttgacggcagaaaaaaatgatcttgacaaataccctttgggggtatatactgataataccccaatagggtatataaaacgaaaggagcgtgcttgtatggaacaagcctgctgtcataaaaccaaacagcgatcagaggaggagtacacaaagctgattcaccggctgaaccgcatcgaggggcagatccgcggcatccgcggcatggtggagaaaagcgcgtactgtcccgatattctcgtgcaggtggccgcggcaaacgcggcgctgaacgcctttacgaaagagctgcttgcgaaccacatcaaaacctgcgtggcggatgacatccgcgccgggcgcgacgaaacgatcgacgagctggtctgcacactgcaaaagctgatgaaataatggtgcaggatcgggcagaatagtttaaagaggtgaagggttatggaacagtacaaagtcaccgggatgagctgcgcggcgtgcagcgcccgcgtggaaaaggccgtctccaaggtgccgggcgtcacatcctgctcggtgagcctgctcacgaactcgatgggcgtcgagggcacggcctcgccggaggcggtcatcagggccgttgaggcggcgggctacggcgcggccgccaagtcggcggagaaggcctcgccctccgtttcggcaagcgaggcggaggaagcgctcaaagaccacgaaacgccggccttaaagcggcggctgatcgcatcgctcggctttctggccgttctgatgtacatctcgatggggcacatgatgtggggctggccgctgcccgccgtgctcgcggaaaaccacgtcgcgatggggcttattcagcttctgctgacggctgccgtgatggtcatcaaccagaaattctttatcagcggattcaaaagtttgctgcacggcgcgccgaatatggatacgctcgtggcgctcggcgcgggcgcgtcgtttgtgtacagcacctacgcgctgtttgcgatgacggacgcgcagcttcgcggcgacatggccggcgttatgcagtacatgcacgagttctactttgaatccgccgcgatgatcctgacgctgatcacggtcggcaaaatgctcgaggcgcgctcgaagggccgcacgaccgacgcgctcaagggcctgatgaagctcgcgccgaaaacggcggtgctgctgcgcggcggcgcggaggtcacggtgccggtcgccgaggtcaggaagggcgacgtgttcgtcgtccgccccggcgagaatatcccggtggacggcgtggtgctcgagggcgcgagcgcggtcaacgaatcggcgctgacgggcgagagcatcccggtcgataaggcggcaggcgacgccgtttccgcggcgacgatgaaccagtccggtttcctgcggtgcgaggcaacgcgcgtcggcgaggacacgacgctgtcgcagatcatccgcatggtcagcgacgcggcggcaaccaaggcgccgatcgccaaggtggccgacaaggtttcgggcgtgttcgtcccgatcgttatcgcgatcgccgccgtcgccaccgtcgtctggctgctcgcggggcagacgtttggctatgcgctggcgcgcggcatctcggtgctcgtcatcagctgcccgtgcgcgctcggcctcgcaacgccggtcgcgatcatggtcggcagcggcatgggcgcgaagaacggcatcctcttcaagaccgccgtttcgctcgaggagaccggcaaggtgcagattgtggcgctcgataagaccggcacgatcacgagcggcgagccgcgcgtgacggacattctgcccgccgagggcgtgacggaggcggagctgctcgcggcggccgcggcgctcgagaaaaagagcgagcacccgctggcccgcgcggtcatgcagctcgccggggagcgcggcacggcggccgaggaggtcgagggcttcgaggcgaagcccggcaacggccttgcggcgacgcttgcgggcgatgtgctcgcgggcggcaacctgaaattcatctccacacaggccgcggtgccggcggcgctgcgcaccgcggcggaaacgctcgcggaggccggcaaaacgccgctgttcttcagccgtgcgggccgcctgatcggcatcatcgccgtcgcggacgtcatcaagccggacagcccggcggcgatccgcgagctgcagaacatgggcatccgcgtcgtgatgctgacgggcgacaacccccgcaccgcgaaggcgatcggccgtgaggccggcgtcgacgaggtaatcgccggcgtgctgcccgagggcaaggagagcgtcatccgcgagctgaaaacacagggcaaggtcatgatggtcggcgacggcatcaatgacgcgccggcgctcacgcgggccgacatcggcgcggcgatcggcgcaggcaccgacgttgcgatcgacgcggcggacgtcgtgctgatgaagagccgcctctccgatgtgccggcggcgatccgcctcagccgcgcaacgctgcggaacatccacgagaacctgttctgggcgttcatctacaacgtgatcggcatcccgctggcggcgggcatctggatcccgcttttcggctggcagcttaacccgatgttcggcgcggctgcgatgagcctatcgagcttctgcgtcgtcacaaacgcgctccgcctgaatttcttcaacatccgcagcgcgaagcgcgataaaaaaataaaggccgttgcggtcgaaatcaaagagaaggagacagaaaccatggaaaaaacaatgaaaatcaagggcatgatgtgcgcacactgcgagggtagagttaagaagtgccttgaggcgctgccgcaggtcgatgaggccgtcgtcagccacgaagcaggcacggccgttctcaagctgaatgcggacatttcggacgatgtgctcaaaaaggccgtggaggatcagggctacgaggtcgtcggctgagccgaaaacagttgacaccgcctgatttcgtgttacaataacaagtaacggcatttcatgcagatcaaagcatccgcctgccgcacgccccgaaaagcagggggcgcggcgggcggatggctttttggggtgcgtgcgccgtgccggagaaatttttctgtatatattttacaaactgttcatacggcattatttttccggtaagaatcattttctataataaacggcagaatttcttacaaaaatcttaagcatgaacgggacgggagttttatatggcaagagagcgctacctgctggaggatacggaggacaccatccaccaaaatccgatcacgccaaccacgggcaaggagaagcggcagaactggtggttttaccacaaggtgcacctgattgtcggcattatagccgtgatttttgcggcctcggtcatctggtcgttcgtctcgaaggagaacccggattattacgtcgcgattatgacggaatacatgctgccggtcgatttgcagctcgacctcgaggagcacctcgagcagtacgccgacgaccgcaacggcgacggcgaggtggccgtcgcactgcaatactaccagttctcgacggacggcacgacggattacgacgcggcgcagcttcaggcctcctttgttaaatttgcggccgatgcgagcaatgcggacagcatcattttcatctacgatgacgcgagctacgaatacctcgacaacaacgatatggagggcttcttcgcccctgtggacggttcggacgaggcgtacgtgctcttctcggatatggcggggctcagcaacttggagctcaaccattacgcggaggagggcagtatcgagacggtgatgaacgtgctcggcaagctcaaggtggcggtccgcgccgaagacggcacggctttcgagaaggcggagaaggtcgaatacaggcaggacagcatcgcgatgttcgagcgcctgaaaaatgacgaaaaaaccggagcagcggcggaataagccgcaaagcgggcggatgtgcaggcttctgcgcaccgcccgcttttttctttgacaccgccgcgtattggcgatataatagagccatattatggccttgcgggccggcgtgcgtgcggccccgcggcaggcctcaaagcgggccggccgcgctgcggaccggaagaaaggagggcgcccgccatacggggggcgcggtgaaggatgatgaaggcggagggcgtatcgatttttgactccaccctgcgggacggcgcgcagggcaaggggatctccttttcggtcgaggataagcttcaaatcgtgcggctgctcgaccggctcggcgtcgattacatcgaggccggcaatccgggctcaaacccaaaggatctggcgttttttgagcgcgcggcgcgactcacgctgcgcagggcaaagctcgcctcctttggcagcacctgccgcaagggctgcgcgccggaggtggacggcagcctgcgcgcgctgctcgagagcggcacggaaacctgcgtggtgttcggcaaatgctggcgcttccatgtcgaccacgtgctcgagacgaccgaggccgagaacctgcgcatgatccgcgagagcgtgcgcttcctccgggaaaacgggcggcgcgtgatcttcgacgccgagcattttttcgacggctttctcgacgaccgcgcctttgcgatgcgtgcggtgcaggcggcggtcgagggcggcgcggagaccgtctgcctgtgcgacacgaacggcggcgtgtttcccgaggacgcaaagcacatcgtcggctatgccgcggcgcacctcggcgtgcccgtctcggtgcactttcacgatgactgcggcatggcggtcgcaaacagcattgtcgccgtcgcggccggggcaaagcaggtgcagggtacgttcctcggcttcggcgagcggtgcggcaatgcgaacctctcggcaatcatcgcgaatttgcagattaagcgcggcgtgccgtgcatcccgcaggagaacatcgcgcttttgacgcgctatgcgcacgagctcgcggcgatcgcgaacctcgaggtgcctgccggcgcgccgtatatcggcagccacgcgtttgcccacaaagcgggcatgcacgcggacggcgtcatcaaggcgccgcggtcgttcgagcatgtcgacccattcctcgtcggcaacaagcggcggttcccgacctcggagatcagcggccgcgccgtcgtgttcgagcgtgtcaagcagattctgcccgcgctcgccgtgcattccgcggagactgagcgcatcctcggagagatcaagcggctcgagatggcgggctaccagttcgagggggccgacgcgagctttgaactgctcgtgcgccggctgatggggctttacgacccgtatttcgagctgaaatactacaagatctattccggtgcgggcgcgggtgaggaggccggcgcgagcgccatggtcaaggtgcgcgtcggcgaggaggtacggctcgtggcgggcgagggcaacggcccggtcaacgcgctcgacaccgcgctgcgcaaggcgctcggcctgttttacccggtgctgaaccgcgtcaagctgaccgactacaaggtgcgcgtgctcgacggcggcagcgcgacggcctcgcgcgtgcgcgtgctgatcacctcgacggacggcgcgggtacgttcacgaccgtcggcgtctccggcgacgtggtggacgcgagctttcaggcgcttcaggattccgtcgaatacctgcttctgaaaaccggcgcgcggcccgcgcccgcgggcgcgtaaggcgccggggctttgaaccaaaatttctgcgcgcgtgctttgcgggacggccgtcccgcggcgcgcggcgcagcttccgcagaaaggataacttacgctatgaaactgaaacaactgctttccgcgattgaatacacggccgaaagcgtgccggagctcgagatctgcgacattgtctacgattcgagaaaggccgtgccgggctgcctgttcgtctgcctgcgcggcgcgagcgcagacggccaccgctacgccgcgatggcggcggagaagggcgccgcggcgattctcgccgaggagccggtggaggccgcggcgccggtcatcctgacggagaacacgcggcttgcgctcgcgctgctcagcgccgaatttttcggccacccggcgcgggacctgacgatgatcggcatcacgggcacgaagggaaagacgacgaccgcgttcatgctgcggtcgatgctcgaggccgccgggcgcaaaaccggcgtgatcggcacgatcggcgtgctgtacggcgaccggctgttccagaccgaaaacacgacgcccgagagctacgaggtgcagaaatacctgcgcgagatggcggacgcgggctgcgcggcctgcgtgatggaggtctcctcaatcggcctgcgcgaccgccgcgtggcgggcttcacgttcgacctcggcctttttacgaacttttccgaggatcacatcggcggcgtggagcacagggacatgtcggagtacatggcctgcaaaagcctgctgttccgcatgtgccgcaccggcgtcatcaacattgacgacgcgagctggcagggtatcgtgcaggggcatacctgtgcgctcaccacgtacggctacggcgaaacggccgatctggtcgcgcacggcgccgagctcgtcacgacgccgagctttctcggcgtgcgtttttccgtctccggccggcggaatttcacggcggacgtcgcgattcccggcaagttcaacgtgtacaacgcgctgtgcgccattgcggcgtgcagcctgcttgatgtgccggacgcggcgatgcaggccggcctgcgcgcggtgaaggtgaagggccgtatggagccggtagagatgcccggcgatttcacgctgcttatcgactacgcgcacaacgcggtcagcatggaaagcatgctgaaaaccctgcgcgcatatcacccgaagcggctcgtgtgcatgttcggcgcgggcggcaaccgcccgaaggtgcgccgcttcgaaatgggcgaggcgagcggcaggcttgccgacctctcggtcatcacggcggataattcccgctatgaaaacgtgctcgacatcatcgaggacatcaaggccggcatgcacaagacgaacggcgaatacgtcacgatccccgaccgccgcgaggcgatccgctggtgcatcgaaaacgcgcggcccggcgacatcgtcgtgctggccggcaagggccacgaggattatcaggagatcgagggcgtgaagcacccgtttgacgagcgcgtcgtgatccgcgagatcctcgcatcgctgaaaacgggagacggcgcggagtgatccgcgcccttggcttcgggcggccctgcggcgcgggaatttccgccggcatgggcgccgcctggaaaggacaggtggactgaaatgaaaatgacagtggcagaaatcgccgcgctctgcggcggccgcctcgagggcgacggcagcgcggcggttacggccttttatacggacagccgcgagacgcagccgggcaaaatgtttgtgccgatccgcggcgagaaaacagacgcgcaccgctttatcccgcaggtgtttgcggcgggcgcggcggcgacgttttcggaggcgatcctcgaagatccggcaggcccggtcgtctacgtagccgattcgcgcgcggcgctgcaaagggtcgcggcgtgctaccgcgagcgcttctcgatcccggtgatcggcatcacgggcagcgtgggcaagacgacgacgaaggagatggtcgcgctggctgtttcggcggggcttaggacgatgaaaacggccggcaatgcgaacagccaaatcggcctgccgatgacggtgctgcgcatcgcgccggaggacgaggccgcggtcgtcgagatgggcgtcagcatgcccggcgagatggcgcgcatcgcgcgcgtcgcaaagccgaccgccgcggtgataacgaacatcggcgtctcgcacatcgagtttatgaaaacgcgcgggaacatcctcgcggaaaaattccgcatcgcggattacctgccggcgggcggcaaggtgtttgtcaacggcgacgacgacctgctcggggcgcttgagagcacgccggaaaagcagatcgtgcggttcggcctcggcgagaactgcggctggcgggcggtggagctcgatgcggacgcctgcggcacgcgctttacctgcgtgcacggcggctgcaaaacgccggtttacgtgccggcggcgggtgagcacaacgtgcgcaacgcgctcgcggcgctcgcggtggcggacgccgtcggcgtgccgcttgaaaaggccgtgcgggccgtcgcgcagtatgagccgccggcgatgcgccagcagatccgcgaggcgggcggcgtgacgctgatcgacgatacatacaacgcgagcccggattcgatgcgtgcggcgctgaagatcctcgccgacctcaaggtgcagggcaaacggtatgctgtgcttgccgatatgctcgagctcggcgactacgcggtgcaggggcaccgggagaccggcgcgtttgcgagggaaaacggcgtggactgcgcggtgggcatcggcccgctcgcaaagcacattgtcgagggcttcggccccggcggcgtgtggttcgcgacgaacgcggaggccgcggattacctgaaggcgcaggtgcgcccgggcgacgcggtgctctgcaagggctcgcgcagcatgcacacggacgagatcatccgcgcgctttcgggcggctgatccggcgggaaaaaccggaaatacgcgccggcgcggcgcgggggaaagggaggacggcaatgaacgcgatggaggaatttgaccgaaagctccggctttttcaggagcagatggcgcagaagaaccagcttgaggcgcggcggcgcagcctgcagaagcagcgcgggccgctcgaggagaaggagcgcgatctgcgccgccgcctctatgcggagcaggccgacgtcgaccggctgaaccgccgcagtctcgccgcgctcttttacgcggtgacggggcagaaggccggaaagctcgcggccgaggagcgcgaggcgctggaggccgcggtgcggcacgatgcggctgtgcgcgagctcgagagcctcgatgcggacctgcaccgcacggcagaggcgctgtgcgcagtttccggctgcgagcgcctctatgcggagacgctcgagcagaaaaagcaggcgatccgcatggcgggcggcgcggatgcggagcgtattgaccggcttgaaaacgagctttcagcctgcgccaatgtgaagcgcgaggcggaggaggccattgaggccggccgccgcgcgcagagccttgcggaatcggtgctcggcgcgctggacagcgccgaaggctggggcacgtgggatctggtcggcggcgggctcatgacggacttcatcaagcacgaccggatcgacagcgcgcaggagcagattgaaatgctgcaggtgcagctgcgccgtttcagcgccgagctttcggacgtcaaggtgttcgccgatatgcaggtgtgcgcggacggcttcctgcgctttgccgacttctttttcgacgactttgtttcggcgtggatggtgctcgaccgcgtgggccgttcgaaggcgcaggtggagcaggtgcggcagcagatcgccgaggcgttgaagcgcctcagcgcgatgctggatgaaacagagcgcacggccctgcgcctgcgcggggagctggacgcgctcgtacttggctgatatatgggaaataaacggcgcccgccgtgcagagcgcgcggcgggccgggaaatcttttgggaggataaaatgatcacaagacttttaaggccggaggaaagctggcgctgggatcaggtgatggccgtcgctttcgagggcaatttcgacatcgaaaaggccaagacggaggcgcagcgcgaaaagacggcggaggaaaagcgcgagcaggcgcgcaaccgttgcttcggctcgttttcggacgacgaaaaaatcctgtacggctgtgtgaacagccgggaatacacctgccgcttcgacggcgggacatacaagctcggcggcgtgggcggcgtttccacgctgccgccgtaccgcagaaagggcgcgatccgcgcgagcatcacggcctcgctgcgcgatatgtacgaaaacggcttcacgttttcctatctgttcccgttcagcacgcagtattaccgcaaattcggctatgaggccgcggccgaggcgcgcgagtggacgctgccgctttcggcgctccgcccgaaggacgtcggcggcacggtggagcagatcttcccgggcggcgatttttccccgctgctcgaggtgcacagcgcctgctttgcggactgcaacatgtccgtcgtgcgcgatcggtacgacgccggcctcgaaaaggcgaatctgatggatgagcagcgttacgtctatgtgtggtgctgcgacgcgggcacaccgcgcggcgtgatgatcgcgcacaagaagcagacgccggagggcgccgtgctcgactgctgccacaccttcggcgcgggcaacgaaaacgacttcctgttctgcgacatggaggccctctccggcctgctgttctttgcgaaatcggccttttcggcggattacgacaagatccgtttcgtaacgcgccgcgagatcgatctctccgcgctcgtcggcgagaacaacgaagcggcctgccgcatgttctggaacggcatgctgcgcgtcgtcgatgtgcgccgcgtgctggaaaactgccgctgccgcggcgcaggctgcgtgcgcatcgcggtggaggatgcgattctccccgaaaataccggcacatggaagctgacttttgcaccgaacagcgcaaatcttgtggaaaaaacggaggagcagcccgacgcttccctgacgatcaacgcgttttcggcgctgatctgcggcgcgcgcgacacacagtctcttgcgtggatgccggacgttgccgtgcacaatacggcggcgccgttcggcggcgtgttttacgcgaagccgtgcttcatgctggatttgttctgagccccggcacgcgcggcaaaatgatagatacggcaaaggccggagcgggaaattcccggctccggcctcgttgtattccggcggctttcagcgcgcctaggagagattcagtttctttttgagaaaatagcggcacaggaagaactgagcggcgagcagcccggtggtcagcagcgcgctgagcgctgcgttgagcgccagcgtgtcctgcaaaatacggattcctgtgcctgcggcgctgagcatggagatcgtgaccgggatcgcgacgacctgcgaaaggaagctgaccgcaaaattcatgccgatataaatgccgatggaggcgaggagcttgtgcctgccgcaggactgcccgatgctgacggcgctgtacgcctgcaggatgccgtaggcggcgtgaatgggcgcgaaaagcagaaactgcacgcagtacgcgcccagcgaggggtgcgacacgatggtgcgcacgatgccctccgggaacagccggagcatgtcgagcgtgctgcgcaggtcgaaggtcatgaagaacagcacgccgagcgcggccgcaaaaaccgccgtcgcgatctgccagatcagcgcgacgaggagctttgaaaggatgatcagctcggttttgaccggcagcgtaaacgtcaggtagccctcgtcggtcgccgtgctgcggtagaagcggatcgccgaaaacagcaccgggcagaagaacagcgtgaatatggcgagcaccgtgaggatgcagagcacaaagacggcgcctgcggagaggagcttcgcaaattccagattcgtgctgctcagaaacaggaggctggaaatcgagagacggtcgatgacgagcagcgcggcaaagatgccgtaggcggagaggaacagccgcgccgttgcccgaaattcgtatttcatcagttttaccagcatcggaacacctcccgaaacagctcgtccacgctctttccgtaatttttgtggatttcctccacgccggaggccagcacgacctgcccgttccggatgaaaacgacgttgtccaaaatgcgctcgatgtcccagatcaggtgcgtggagagcaaaatcgtcgcgccgcgctcgtagtttttgaggatcgtattcagtatgtagtcccgcgcagcgggatccacgccgccgatcggttcatcgagaaggtagaggcgcgcggcgcggctcataaccaaaatgagctgcaccttttcgagcgtgcccttgctcaatgtgccgagcctctgcttcgggtcgatttgcaggctgcgcagcatttcttcagcgcgctcggggtgaaagtcgtcgtaaaaatcctgaaagagcgcgaccgcgtccgacacgcgcatccagcgattcaaataggtgcgctccggcagataggagacgatgcgctttgtctccgggccgggcagcatcccgccgatgcgcacctcgccggccgtcggcgtaagcagaccgtttgcgagcttgatcagcgtgcttttgcccgagccgttcggcccgagcaggcccacgatgcgcccgggcatgaccgaaagcgtcagcccgttcagcgcaggaaaggcgccgtactgcttgcagagccctctgcattcaagaatcggcatcataataaatccccctgttttccggcagccgcacagtgccgggcagccgcctgccgcggcgccggcgagccgcgtaaaggccgcccttttcaatcccttttttcaaactttctgtctcctaagataatataaacgcacgggcttgtcaacgctttggccgggtcttaaaggatttgtaagctttccgaccaaaacgggaaagcaaaagcggcgccctctgccagagaaggcgccgccgcaggatcattcggtttctaggtgtacgaggtgcgcgatgcccggaatgctctcgccctgctgggaggaggttgtggacatcagcgcgccggtcgccatgaacaggatgctgtgcagctcgccgcgcgccatgcggtttaggatgtgcccgcacagcacactggcggagcagccgcagcccgagccgccggcgtgcacgtcctgcgtttcccggtcgaagaggagcaggccgcagtcctcgtggttttggagccgcacgccgttttccgcgagcaggctgcaaagcagctcggtgccgaccgcgccgaggtcgccggtgtagatgcggtcgtaatccgcggggccggtcgcggtgtcggcgaagaagtcgagcagtgtctgcgcggcggcgggggccatcgccgcgcccatgttggccacgtcggttacgccgaaatccttgatgcggcccacggtcgcgcggcgcacgcgcacgccctgcccgtagccgagcaccgcgctgcccgaggccgtcgcggtccactgcgctgtgggggtgcgctggcagccgtattcgagcggcgtgcggaactgccgctccgctgtgcagaagtgcgaggaggtcacggcgcaggcgtagtttgccgcgccgctctccacggcgactgcggacatcaagagcgtctgcgccatggtggagcacgcgccgtactgcccgagaaacgggatgtccatttcgcgcaggccgaaggtgcttgagatgcactggttcaagagatcgccggcgaagatcatgctgatgtccgatttctcgaggccagccttgcggatcgcgagcgtcgcggcctcggtttgcagcatgctttccgccttttcccagctttcctgcgcgaggtaggaatcgagaaaggtttggtcgaaatcgcgcgcaagcgggccctcggcctcctttttgccgccgaccgccgcgtgcccgagaatcaccgggcagcgctcaaagagaatggtgtatttgccgagccttttcactgtgatcttgtcctttcctgcgaattttgcgccgtgttttagccctgaaacagcccgatgacgtacagaacgacgccgtaaaacaccgaggccgagatgccgaaaacgagcaccgggccggaaacgacgaacatttttgcgccgagaccggtcacaaagccctcgcttttgaattccagcgcgggggagaccatcgagtttgcaaagccggtgatcggcacgagcgtgcccgcgcccgcgtgctttgcgatgttgtcatacacgccgaaggcggtcagcgccgcggagagaaaaatcagcgagacggaaacaaaggtgcgcgcgtcccgcagcgtgaagccgagcagcatgaagaggtttgcgatgccctgcccgagcgcgcagattgcgccgccgaatagaaaggcgaagaggcagtttttcaggacgggcgagcgcggcgaaacctgctgcaccatcgcgccgtattcccgaacggatttcgttttcatggtgaacgtcctttccgcaggacgaagatataccctgcatttaatctttcgctagtatttcccgcaaaatgaaatccatacaaaaaagctttccgaaacaaagtcggaaagctcttttgcagcttattcagccggtgcttgatttttaatcggtgtgccgatgcggattacttcctgtggctcgcttttttctgcatgcggaaatatacgagagagagagtcaggcacgcggcaccgatgcacaggatgacaacccacatagcgggattcgtgctgtcgccggtctgcggcgtatcgaccgccggcttctcgggctgcggcgtgggcgtcgcggccggtgcgggcgtggcctctggagccggggtcggcgttacggcagccgtaggctccgcagtcggtgcgggggtcggctctgccgtaggctctgtggtcggtgccggtgtgggctccgtggtgggggacggcgagggttccgtgctcggctccggctcctctgtctcaacagcataggcgagaacaaacggcgagaagcttgcagttgtgaattcaaagtaatctgtgccgtttacagttacaagctccggctttatcgttataagctcttctatctgcgcgactacatcgccgttattgtaatctctgtccacgccgtcgaaatggtagatgcacgcttccttgctgttatcatagtctgctggaactggccagtataccgtgacggcacatccgtctccgagcgtcagatatgcatcgccgttgtttatatccaccaaatcaaaataccgctgctggaacttgacattaccgtcagggagctcgtccgccctttcttcctgaatgtaatgcacaaggatgtcctgatcgatgagctcgtctaccatcagccgcacgcccgatgtgtcctccagctgcacgtctttgtcgttgacaaagtatgtcgtgcctgcgtctgccaccgccgcaaaatcaccgggctttatctcgtcccgattctctacaacctcggcgtgtttctcgttgatgtttgcctttactgtaagcgtagcatcctctgactgggataccggatacgtgtataccttgtcaccgatcttgatctcggcagtcacatattccgcgctcagcgatccctgatacaggttcatgctgaactgcttaaactgctcgtccattttgacttcaaagtcatcggaaacaatgtagctgccgttttcgtcctgtatctgcacgcggacagggtcctgaccttccataaccggaacaaatttatacatgtatccgactttgtcggagctgtgttccggcgttccgtaagaatcgagtttccattcgcgcgtggtgcccttaccgtcgtcatacttgagcgtcaggatactctcgaggttggttatctgacccagcttgtcattgagctcttgaggaagcgtgaaataaaagcccggctcagggaatccgttttctgtgctggattcaccctcctgaccgtctacaacgccttcgtagctgctgccgccggtataaatggtgatgtcagaaagtgaaatttcgatcggcttgatttgctccagctcgatgatgttgtagtagctgaacgagtaattctgataggaatctcccatgcccggaccgtcaataccgaaccctgacggtatctccacggtatctccagtctcaaatgaatcggagatcaggctctcgaaatattggttcgtctcctgataaaggcccgtgtccggcagataatcacccacggcgtgggcgcgcgagaactcgacgcctgctccattggggttcagcgcattcacattttcttccccgtatactacgctgaacagccccatataaaggctgttgtagctgaccgcagcaagctccggctccggccacttaatctggatatttagattatctccactctgcgttgcataaacaaaactgtcgatccacggatatttttcaatatatccagttaattcatcttccgacattgtccagatgccgtttttagtcaccaagtcgccatcaagccagtttggatgatccgcaaacaggtcggtaagattatcgtagcttgtccctctcttattgttgtaatacgcaagcatgtaatctgtgatagccgtatttccttcgtatccggcatcagcaagataatcataaatctggcacatcatctcgaaagtcaccttggaagagcttgacacaccaaaaacatcttcgtaaaaataataggggagcaccgcaccagccattctgatcggcataagctgcccgtcataagttaaaacgggaagcatgcttccttcactcaaactcccatattcttctgtatctccgggagcaagaacaaagctgttattcttgtaacgatatgtatttccggattcattctgcagtatgatctggaatttataggcatctccgggcattatcgattcattttcaaagaaagccagcatgcctttagacagctcgataaccgggctatctcccgcgtcttcgtgaatcgtgtagtaaaccttgcagacatctccgtctatcttatacccgtcataggtaacaccatcggactgcctcttgctgtagtcaaccgtacaggtttcttccggaaagtcaattccggccagcggcgccgcttttgccgttttccttgctgccgcagcgccggcttcggcatccgtgcttacttcttcgctgctgttttccccggaagcctccggtgcagggcttgccgaaggagaagcctcaggcgctgcggaaggcgcgggcgtgccgtccgcttccggcgaggcagaaggagccggcgtgccgtccgtttccggcgtggcctctgcttccggtgtttctgcgctttccggttcggaagtttccggtgcaggcgtgccatccggcgactgtgtgccgtcgttttccgtcgtttccgcggcggaggttccactggaaagcccgggggcttcgtctgcgaaaaccgtcgtccctaaggaaaacagcagaagcacggccagaaaaaccgcagccacttttgaaattttttgcgttttcatttaccttagttcctttcctgaatatttacaggccggcataggaaatttgaggaaccgaaggctgaacgaaaaagcagactttttcgttcgggcatgctataatacaaaagtatagaaatagggcggtaaaatggggggaggatgtagccgaaatcagtgaacgatatttcctacattttccaatcaaaaaaatattttgacggcagaaaaaatgatcttgacaaatccccaatggagtatataaaacgaaaggagcgtgcttgtatggaacacgcctgctgtcataaaaccaaacagcgctcagaggaggcgtacacaaagctgattcacggctgaaccgcatcgaggggcaaatccgcggcatggtggagaaaagcgcgtactgtcccgatattctcgtgcaggtggccgcggcaaacgcggctctatcggctgcaagcacaagttctgctttgaatccgccgcgatggtcccgacgctgatcgcggtcggcaaaatgcttgaggcgcgctcgaagggccgcgcgacctgccgggcgcaagggccgtcgcggcggatatgggccgtgtgctggcggattggttgccggagaaaatggaatacgaggcgtaaacgcgcataaattccgcaaaaagggtatggaaaagcagcaggttttcggcctgctgctttttatgttgggattctgttttacggcttctgctttttggactttgaagcgaccgccgcgccggtcaggagaatgccggaaacggatgcgacggcgatccaaagcagaacgttcgtctcatcgccggttttcggcacattattttccggctgctcaggctttggagacggcgtgacagacggtgcctccgtcgggttcaccggtgccggtgtgggtgttgcagtcggcgcaggtgttgtggtgggctgctcggtcggatcgggctgctcagtcggattgggatttgctgtcggctgggggttgccggtcgggtttgcactgggttcagcactcggctctgcgctgggttcagcactcggctctgcgctgggttcggcgctgggctctgcactgggttcagcactcggctctgcgctgggttcagcgctcggctcggcgctgggctcagcacttggctctgcgctcggctcggcgctgggctcagcacttggctctgcgctcggctctgcactgggttcagcacttggctctgcactgggttcagcacttggctctgcgctgggttcagcactcggctctgcgctgggttcggcactgggttctggagaaggtgtcggtgcggtttttttagcccacacagcaaataaagtagtatctcttacgattacaatggaatcatgggcggagtattctgcctcaatggcgtctttatcagtgttccaaccgagaaattcaaaaccctctcgtgtgggcacaacatccgatacggtaaattctgcactgccgctcgccgacgatttggtctccgattccggcgcgccctcgccgtcgttggcgtcataggacagggtgtagtcggttgtaggcgcaggggctacattgacggtataaatcagataagcgattgcagcaccttgtgtaccgctccaaatttggcctggtgcaacctttgttacagcagcgtactcaactttaacggttgcagttccttctgatttgcctgtgaattctacagacatgctgccgtcagaattagccttggtggtaacagaaacggcttccggattggagttgctcgctactgttgggcctcctgcataacccgagaaattaaccgagtccgcaatgccgtagcttgtgtagtagaccattgtaccgcgatccgtgactttatcaccggcttcgaccgttaccgttccataagtatcgtcggcgtagttgccggaaacggtaggagcgctaataccgccttggtcccataactcacgtgtaataaaagcactttttgttacggacgatgccgcaaatacgcttgatggaactatagccaccaaaagaagcattgcgagcagcaaagccgcacatcttttgattttcacttttttcattcctcctatttggtttgttttgatttgaaaagctcccgtttgtttcttgaaagcatcacctcgtattggtgtggaggaagcggtgtttgcctgataaatcagactttttcgagcgcatatgttatactgaaaaaaagtcaggttgcattgaaaaaagtgcaaaaaacatgtgaggatgcacaaaaagcaggatcttcttttggacaatttatgaaaggaaatcttgcacgaaatttcctatattttccttcaatttttccgccgtaaattaagaaaaatggggctttattcggaaaaaagacgcgggatgcggcgcgtttctgcacgaaaatcccgattttagaatactttcacataaaaactgtgcggggaaatgtgcggacggcaaaaaagcgcccggagacaagccgatgtctccgggcgcttttattgcttccgtactgcggttcagcgcatcataatcgccgaaatcgcatcgagaattttattgtgacatttgccgcagccggtcgagcagtgcgtgatcttctgcacgtcgtcgaaggcctgaagcacgtcgtcgaaatgcggaagctgctgcagtgcatcctcgacgtcgccgaaagtgaccttcttgcagtggcagatttcatagccgggttccatgatctgggtcatttgtttttcctcctttcgtgggcagaaaagcacctatgtatactgcgattttatcacgccgggaggtgaaaatcaagtgtgcgcgcagattttattccagctcgaacgcgccggtatacaggcggtagtaggtgcccttctgcgcgatcagatcctgatggctgccgcgctcgatgatgcggccgtggtcgagcaccatgatgacgtttgaatttttgaccgtggagagccggtgcgcgatgacaaagaccgtgcggccgtgcatcagcgcgtccatgccgctctgcacgatggattcggtgcgcgtgtcgatcgagctggtggcctcgtcgagaatcataacgggcgggtcggcgaccgccgcgcgggcgatggagatgagctggcgctggccctgcgaaaggccgctgccgtcgccggaaagcacggtgtcgtagccgttgggcagcatgcggatgaagctgtcggcgttcgcgagcttcgccgcggcgatgcactcctcgtcggtggcgctcagcttgccgtagcggatattctccatcacggtgccggtgaagaggttgacgtcctgtaaaaccacgccgagcgagcggcgcagatcgggctttttgatcttattgatattgatgccgtcgtagcggatcttgccgtcggcgatgtcgtagaagcggttgatgaggttcgtgatcgtcgtcttgcctgcgccggtcgcgccgacgaaggcgattttctggcccggcttcgcgtagagagaaacgtcgtgtagcacgatcttgtcgggcacgtaaccgaaatccaccccgttgagctccacaaggccggtaagctcggtgtaggttacggttccgtcgctgtgcgggtgcttccacgcccagaggccggtgtgcttttcagcctcgacaagcgtatcgccgcgcctttccgcgttgacgagcgtcacgtagccctcgtcctgctcgctttcctcgtcgagcagcgcaaagatacgggaggcgccggccattgccatgatgatcgacgagatctgctgcgtcacctgactgatcggctgcacaaagctgcgcgagagctggaggaaggaggcgatcgcgccgagcgtcatcacatccatgccggtgagcacgagattcggcgtgccggaaagggccatgaggccgccgagcacggcgatcagcacgtataaggcgtagccgagcgcgttcatgatcgggccgaggacgttcgaaaacttgttggcctccgcggcattgccgaagagctcctcgttccgttcgtcaaaggcttccttggctttatcctcgtggcagaaaaccttgacgactttctggccgttgatcatttcctccacgtagccgttgaccgcgccgagcgactgctgctggcgcacgaaatagcggccgctcttcgccgtgaccttgccgatgaccttgaacatcaaaagcagaaagacgatgacgaaggccgtaagccagacgctgagggagagcattgagaaaaagacggcgacgaccgaaaagaccgaggagatcgtctgcgggatgctctgggagatcatctggcgcagcgtgtcggtgtcgtttgtgtagtggctcatgatgtcgccgtgcgtgtgcgtgtcgaaatatttgatgggcagcgtctgcatgtgggcgaacatgtcgtcgcggatcgacttgagcgtgccctgcgagacgaccgccataatgcggttgtagagcagggaggcaaacgcgccgatgagatagatgacggccatctgcccgagcgcgaagagcaggccggtaaagaccggcgccgattcgagcaggagcggcgcgatgtaatcgtcgatcagctgctgcagaaacagcgaggacatgacgcttgcagaggcgctgaccgcgatgcagacgaatacgaggatgagctggaagcggtaggccttcatataggaaagcagccgctttaaggtctttttatcgagctgctgcaggctttccttcatcgaaagccgcgggccgttaggacgtgggggcattgtcgtcgtctcctttcgtctgggattcgtaaacctcgcggtagatcgggctggatttcagcagttcgtcgtgcgcgccgcagtccacgatcttgccgtcgtcgagcacgaggatcatgtcggcgtcctgcaccgaggtgatgcgctgcgcgatgatgattttcgtcgtgtcggggatctccttcgcgaacgcctcgcggatcagcgcgtcggtgcgcgtgtcgacggcgctcgtcgagtcgtcgagaatcaggatcttcggctttttcagcagagcgcgcgcgatacataggcgctgcttctggccgccggagacgttggtgccgccctgctcgatataggtgtcgtagccctgcgggaaagcgcggacaaagtcgtccgcctgcgcgagcttgcaggcatggataagctcctcatccgttgcgtgttcgctgccccagcgcaggttttccttgatcgtgccggagaacagctcgtttttctgcaggaccatcgcgaccgcgccgcgcagcgtgtcgagatcgtagcggcgcacatcgacgccgccgaccttcacgcagccctccgtcacgtcatacaggcgggggatgagctgcacaaggctcgatttcgaggagccggtgccgccgatgatgccgaccgtcgcgccggccgggatcgtcagattgatgtcgctcaaaacgggcttgccgttgtttttgtggtagctgaaccgcacgttgtcgaatacgatgccgccgtcctcaacatgggtgacggcgttttcaggcgtcgtgatgtccggcgtctcgtcgagcagctcgacggcgcgctcgcccgatgtgcgggacatcgtgatcatgacgaagatcatcgagaggcccatcaggctcatgaggatctgcgtcgcgtaagagatcaggctcagaagctcgccggtcgaaaggccgagtgccgcgtcgccgccgcaggccacgatggcgcgcgcgccgaaccacgagatcaggatgattgcggcgtacatgcaaagctgcatcagcggggcgttccaagcgagctgctgctccgcctttttgaagtccttgtagatgcgctcggagatcgcgttgaatttctgctcctcgtggtcctcgcgcacgaaagatttgacgacgcggatgccgtgcaggttttcctgcacgacgccgttgaggtggtcatacgtgcggaaaacgcgctcgaagatcgggtgcgtccgcgtcataatgaagtaaaggccgaacgcgagcaccgggatgatcgcgaggaagatcagagagagctgcgcgtcgatcgagaacgccgcgacgagagaaaagaccatcatcagcgggctgcgcaccgccatgcggatgatcatctggtatgtattctgcaggttcgtcacgtcggtcgtcaggcgggtgacgatgctcgccgtcgaaaacttatcaatgttcgagaacgagaaggtctgcaccttgtagaacatgtcgtggcgcaggttccgcgcgaagccgctcgaggcctcggcggcaaatttgcctgagatcacgccgcacagaagctggcccgccgccgagagcagcaggatgagccccattttggcgacgtagggcatgttgccggcgtcgatgccgtaatcgatcaggttggccatcagaatggggatgatgacctcaaaaacgacctcgccgctgatcgtgaccatggcgaggatggagctttttttctgttcgcggatgctccgcatcagtttctggatcaagcccgaccctccttctgtgttttctgccgctccagcgcggcggtgtcgatgttattctgcatgcgctgcaaataggcgtgcagcgtgcgcacctcgtttgccgtgaagccgcgcgtcagcacgctttccagcatttcgtggtcctcgttgatggtttgcagcagatcctcggcctgctttgtgagcgtcaggcggcgcaggcgcgaatcggtttccccgatgtggcgctccacaaagcccttgcgcacgagcaggtccacgaccttcgaggccgtggagcgcgttacgccgaagtggcgctccacgtcgcgcaggtagacgggcgagccgcggtgctcggcgatgaagtggatcacccacgtgtttgcgccggtgagctggtcgttttcccgcttgtgcaagtaggtgtcgatgaaccggtgcgtcttgctgttcagtgcgtgcagcgcatgcccaatgctttctttcggcatatcgaccgcatcctttcttttattaaagtggaagtggataggtttgagcggacaaaattggcatgcggtgaacaatcatgcgcttaattgtttgctctggcctatattatagttggcgtattcaacaatgtcaagatgttagatttgaattttcaaaaaaatttctgccgggtgttttcttgcaccgccggatatgctataatggatttgtcttaaaaacggctgcgggctatgccccagaaatggagaactgctgaaatgaaaacaaaatgcgcgttctggattgcgggcgccggcgtcctgttcggcacggtgctgcgctgcatccagatgcttttcttttttgattacgaaacgggcttcgtgacggacagcggcacgctgacgatcctctacagcggggcgacgctcctgtccgcgctcgcggcgggcctgctctgctttttggaccgcgggcgctgcggcgtgctgcggccggtgagaagctggcccgccggcatcacatcgctgcttgcgggcgttttccttctgctctgcgcggtggcccttttgtgggacgcgcacgcctacagggcgttcggcgtctcttacttcgtgctgcccgcgcaggtgcagtcgcatgtgccgttcgctgttttcacggtgctgttcggcgctgcggcggccgcggcggccgtgctctggatgcgcggcggggcgtttcccggaaagcccggcgcgctttgggcgctcggcgtcgtgtggggactgagctacatgctgctgaccttcatgctgtattccgcctcggctacgaccgtggaaaacctctacacggtcggcggcggcgcggcgatgctcctcttcctgcttgccgagggcaagctgctctccggcgtgggcgggcagaaagcggcgcgcacggcctttgtgttcggcctgcccgccgccgtgttctggctcacgtatgtggtctcgaatacggtgctgattgttgccggccgcggctatgccacggagatgccgtatgtgatccagctcgccatgctcgcggtctgcgtgcacatccttgcgctgcttttctccctcagaggggagattttcgcgctgtgtgcgcccgagcacgcgcccgcacacgagaaaaagcccggttttaaggcgggttccggccggtgagcggcttttttagggaaaaagtttggtgttcagctaaaaaagccttgtattatttccggaaatgctataaaatataggcaagatcttgtatctacaaatatcaggaggtataacaatcatggcagttaaagttgcaatcaatggttttggccgcattggccgtctggcgttcagacagatgttcggcgctgagggttatgaggttgttgcgatcaacgatcttacgaagccctccatgctcgcacatcttctgaagtacgataccgctcagggcggctactgcggcaagatcggcgaaggcctgcacaccgttgaggctgacgacgaggcgaacaccatcacggtcgacggcaagacgctgaagatctacgcggagaaggacgcgaaggaccttccgtggggcgagatcggcgttgacgttgttctcgagtgcacgggcttctacacctctaaggcaaaggcgcaggcgcacatcgatgcgggcgcgaagaaggttgtcatctccgctccggccggcaacgatctcccgacgatcgtttacagcgtgaacgagaagaccctcacggctgaggataccatcatttccgcagcgagctgcaccacgaactgcctcgccccgatggcgaaggcgctcaacgactacgctccggttcagagcggcatcatgagcacgatccatgcttacaccggcgatcagatgatcctcgacggcccgcacagaaagggcgactaccgccgtgcgcgcgccggcgctgcgaacatcgttccgaactccacgggtgctgcgaaggcgatcggccttgttatcccggagctcaacggcaagctcatcggctctgcacagcgtgttccggttccgaccggctccacgacgatcctcacggctgtcgttaagggcacggacgtcacgaaggaaggcatcaacgcggctatgaaggcggcggcctccgagagcttcggctacaacgaggatcagatcgtttcctccgacgttatcggtatgaagtacggttccctgttcgacgcaacgcagacgatggttgcgaagatcgcggacgacctctatgaggttcaggttgtttcctggtacgacaacgagaactcctacacgagccagatggtcagaacgatcaaatacttcgctgagatctaatttttcagtctgtacggaaggggcagggtttttcctgtcccttctttgttttatgcggcggatgggccgcggaaacggaggaaacggatatgcaggaaagagtgcgtacatttctcagggaaaacgatatgctctgcggcgcggcggcccggtgcctcgacctcgcgagcgagaccggcgaggtcgcaaaggagattctgcgggggatggactacggcaaaaggccgtacacgccgacgccggagaccgcggaggagctcggcgactgccttttttcgctgctggcgctctgctgcgagctggacgtcgacgccgaaggggcgctttccggcgcgcttgaaaaatacggcgcgcgcctgcggcggaagggcgatgcgggctcgcggtgacggcgctctgcgtgcagcttatgcggcagaagtcccctgcgatgccttcaaagcatacagcgggatgcaaaccagctatttgctttttccgccgcgccgtgctagaatagtcgcagatggatgaaaaacaaggagtggatataaacgatggcacagaaaaaactcggcttcggcctgatgcgtctgccgtctctggacgagaacgacccggggaagatcgacatggagcagaccaaaaagatggtggatacctttctcgagcgcggcttcacgtattttgacacggcgtggatgtactgcgcgttccagagtgagcgcgccgccaaggaggcgctcgtgcagcgccacccgcgcgacagctttacgctggcgacgaagctgcattccggcttcatcaagacgaaggaggaccgcgaccggatcttcaacgagcagcgcgaaaagaccggcgtggaatttttcgactattacctgctgcacgacatcaacgtgcacagcctcgacgtgtacaacacgcttgactgcttttcgtggatccgggagaaaaaggcgcaggggcttgtaaagcacatcggcttttccttccacgacggcgcggcgctgctcgaccgcgtgctgaccgagcacccggaattcgagttcgtccagcttcagatcaactacctcgattgggacagcgccggtgtgcagtcccgcgcgtgctacgaggtcgcggagaagcacggcgtaccggtatttgtcatggagccggttaagggcggcacgctcgcggctgtaccggatacggtcgcggaaatgttcaagtcgttcgcgccggagatgtcggtgccgtcttgggccatccgctttgcggcgagcctgccgaacgtgcagatcgtgctctccggcatgagcaccatggagcagctgctcgacaacaccggctacatgcaggactttgagccgctcagcgaggcggagcgcgcggtcgtgcagaaggctgtggagcggatcaacgcgaacatcgcagtcccctgcaccggctgcgcctactgcgtggacggctgcccgatgaacatcgcgatcccgaaatatttctcgctctacaacgccgatatgcaggaggtcaagggcaagggctggaccccacagggcgaatattacgacaacctgacccgcgatttcggcaaggcgagcgactgcatcgcgtgcggccagtgcgagggcgtatgtccgcagcacctgccgatcatcgagcacctgaaaacggtggcgtcgcatttcgaaaacgagggataaccgaaaaacgaaaaaaggctgtatccgaaaaaaggatacagccttttggctttctgaaggcgcattccgcacgggcgaaaaagagccgctgccccggcctcacagcggcagcagggggagcaacagctcgcagacgagcacgacggcgctcgcgaacaccgcgacgctcagaaggctcttgccgcggaacgcgaggaaaagcgccgccgcaaacccgagtgccgcgctgaacgtgctgccggtcgaggagaggatcgccgggaaggtcatcgcggaaagcgtcgcatacggcacataatagaggaatgagcggatgtatttgttcgtgattctgcgccggatcagcgtcagcggcagcaggcggatcaggtaggtgacgagcgccatcacggcgatgtacgcgaaaatctcaggccgcatggctttcctcctccgcgggcttgtcctcaagcggggcgagccacgccgcagcgcccgcgacgagcaccgtcaccaaaatgatgcggaagcccgaggaaatctcccggagatacggcgctaaactgaacacggcggaaaccgccatggaaacgacggcgacggccgcgacggcgcggttctcttttgcgggcggcacgacgatcgcgatgaacatgccgtacagcgcgatgccgagcgcgttggtgagcacgccgggcagaatgctgccagccacggcgcccagcacggtgccgagcacccagccgggcaccgccgcggcgatcaggccgtagctgtagtacggggagagcggcgcgggccggctgaagctgacggcgaagatctcatcggtcatgccgtaggcgatgccaaaccggtgcgcaaagcgcatgtcgggggagagccgctgcgagagcgcgcaggacatcaggaagtaccgcaggttgatgacgagctgggtgaacgcgagctcgaggtaagaagcacccgcggcgatcacgccgagcgccgcgaactgcccggcggaggtcaggtttgcggcggagatcacggcggcttccggcacggtgaggccgatggcggccgcctgaatgccgaaggcgaacgaaacggcgaaatagccgaagcagatcggcaggccgtcgcgcaggccggccgtaaaattctgtgctttcgtgagcatgactcgaaattcccctttatgtatgtcgtcctttcccgcagttttcggggaaaggggttgaaaaaaggcggttttcaccgccttgaaacagacataaaaatccccgcccgaccgtaacgtgctctcaataacctgctactgtaaaagcaggtgggtgccctcccacaggtttctcgctcccttcttccaacggcggtcgagccgccgccgggaggtctgcagtccgtctgtggagccgggctcccgagtatttgagtgtagggttattcttgcacggtccgcgtatcgggcaggtaattctattgtttgtgtgcgccgggctgttatgcgcggaaggttattcctcctcgtcctccattgcctgcgcgtagcgcgattcgaaaatgtcggccagcttatcgagcagggcctcatcctcaacctcggagagctgctcctcgccgtctacattgacgagctcgaagatatagtactcgtcggcgtctgctacgtcgccctccgcgtcgctgagcgtcgggatcagcgccataaagtagccgtcgtcgttctcgatttcgtcgatgatctcgaattcgtgctcgttgccctcgtcgtcgagaagaacgacgagatcggcctcgtaatcctgttcgttttctatactcatggttcagaccgtcctttcagatttcgggcggagctttattccgcacccttattgtatcgtgaaccgcccgcaaagtcaaggcgttttccaaaatcgtttgcggctgatttgaaaataatatgtgaatgaaacttattgattcaatacaaaatctatgttaatatatgagggaatcgggtgaaatatccggaaagagggtgtgggaaatgtcgggtacatttttgaaatgcgtggcgctggccgccatgtttgccgatcatctgctgaaaattcttttgacgcagccgttttttatgcaggtctgcgggatgtcgctggaggcttcttgggcgctcctgcattcgccgcttttctatgcgctcgagctcttcggccgcatggcgtttccgatctttgcgttttcggtcgcgcagggcagccgccacacgcacagccgggagcggtatttgctgcggctgctgcttgtcggcttaatttcggagatcccgtttcagctcgccttcgaatggggcgagatcgggctgggcacgacgaatgtattttttacgctgctgctcggcgcctgcgtgtgcatgctgttcgagcactgcgcgcggaaaaacgagcggagcgcgtggcttctgttcagccttgtgctcctgatggcggtgtatatcgcggagtatatgcacatggattacggcgggtacggcgtcttctgcatttttctcctgtacgccgtgcggaacaggcttctgctcggcgctctgctcaccgttttgacggcgctgctgtacggcgcgccgttcagcgcggacgctgcgctgctgtttatcgccgcgatgggcggctatgcgctgctcctcttgtataatggcgcgcgcggccggccgatgaaatggctgttctacgcgttctatccggcgcatttgattgtgctgtacggcgcggcgtacctgctcggcatcggctgatttcagggctttcccctttttgggaaagcccttttgcttttttgcacaagaaaaccagatgacatatgtaactaattatctcggaaaaagttaaaaataactgttgacaaaatgaaatctgcgtgctattatataggtgaacaagaggaagaccctcaggaacgcgaagtagatcggaaggatcgtcgtaaggcggttttctcaagcggaagctcaaaaagtttcggaagcggatcgaagaggttccggcacgcgggatttaaaatcctgaaagcgaaaaggtgcggggaaaatactcttggaagcacagcatttcttacaaagtgagatccgattggccgttcagcaatgaagcgcagaaaaccgggtcgagagaaaagtatccggcgtcagacccaaagctttcattcttcgtcagaagcggaaacattcccgaaaaaagggatcaaagcaaaagcgaaaaacccaagatactgcaaacgcagatcaagaggcagaagcgaaaagcaggaaacgcagacggaagcgaagaaacgagagcacagtgggacggagattttgagaaattcaaatcggacggcgcggaatcttttaaaagaaagctgtggagagccgcaaggcaaatttattacagaaagcgggtgggcccaatgggtagcgaagcacagcagcatattgtccgcggcacattgtgcctcggataatatacagcaggaaaaatgcctgcagaggcacgcggaggttttaagtctgccggtagtttgaaagagatgcgaatccggaagctggcaaatgtcgaagagacgacgcagaaaaacggagagcgcttttaaatcaggcggatactggaaatgagcggcttctttctgaacttaaagttcagagcgggcgaaccgaattgtaaggtatcagccgggattcctgatttgtcggagagaatatcgaacggcaggagggaaaatcatgcggcaggaacagacttccggatatctgcatacgcaatatttcaggctttagaaaagctgtggaatcaaagattccgaaccgtaaacgcgattggcagggaaaatcccgaagttgtggatataaaacgattcaaatcaaaagttaatatacaatgtggtatataagataagacaaaataagtttttgtttggagttgtctgcgatgtacgggtaaagcgcttcaaaaattgaagcagggtgaaagccgtaaagcctgttcgattcgaaaaaagcagtgagctgtaagaacggtaagctgtatcgaatcgtgtgaagtcaaagaaaccgaacaatttgagtttcagcagagggcaaaccaatgcagtagtttattgaaacacaaagttataacgcgtttatctcaccttaatataacacacaaaagagactcttccggaaacgggagagtttctttttgccctgttttcagtatttaccggcgggattgggcagaatggatgaagaaaggaattgtcatattcggaaacttatgctatactgacttaatagagagccggcctgtttgcggagaacggaagcgggaggtgcggcagaaaggaatggtttgcaatgaaaccagaactcgataagatttacgatgtaatcatcgtcggcgccggcccagccggcttgactgcggcactctactgcggccgcgcgggctttgccacgctgatgctcgagaagctttcccctggcgggcagatggcgacgacgaatgaaattgaaaattacccgggggttcccggcataaccgacggctttacgctggcgatgaacatgaaagcgcaggccgagcagttcggtgtccggcaggattacgcggaggtcacagcgctgcgcacggagggcgaactgaagctgctggatacgaaggccggaacgctgcgcgccagaagcgtgatcctcgcgcccggcgcggcgccgcgccttctcggcctgccgaatgaaacggcactgcgcggcaagggcgtttcctactgcgcgacatgcgacggcgcgttttaccgcggaaaaacggtggccgtcgtcggtggcggggatacggcggcggcagacgcggttttcctctcctcgctgtgcgaaaaggtgtatctgatccaccggcgcgacaagctgcgcgcctccaaaagctacacggcgaagctcgataagccgaatgtggaaatggtgtgggatagcgtggtcgaagaaatcttggaaaacggacgcgtgtgcggcatccgcgtgaaaaatatcaagacgcaggcagcgcgcgaaattccgctcgacgggctgttcgtcgctgtcggcaatgtgccggcgacggatttcgtgcgcggtgcggtagaacttgacccggccggttattttacggccggcgaggatacaaaaacgaatcttcccggcgtttttgccgcgggagactgccggaaaaagccgctgcgccagatcgtcacggcagcgtcagacggcgcggtcgcggcctacgcggcagaagaatatctctcctgaggcgggaaaggcggttgctttggaaaaaataaaagtgctctgcgagaaataccgcgagctgctgctttatgttgtgttcggcggcctgacgacgctcgtcagcttcgtttcctactggatcttcgccgacggctttcatattcactatatggcgtcgacggtgctgtcgtggatcgtctccgttacgttcgcctatgtcacgaaccggagatgggtgtttgaaagccgcgcgcacggctttcgcgccgtctgcatggagatcgtccgcttttatgcgtgccgcctgttttccggtgctttggaaatggggctgatgtacgccggcgtcgatttgctgcacctcaacgataaggctgtcaagctcgtggcaaacgtgattgttgtgatcgcgaattatgttttgagtaagctgatcgtttttcgtaagaaacgaggcgttgacgaatccgcataacagggctataatattacaataaacgatcggcagccgcatccatggatcagggcttgcgggcgcgtttctttcggaccgctccgcacagcgccggaagccgtgcggaaagttctcttatacggctggctgcgattctttggaaaggacggcttccgcaggggcgggagcaaggtgaatggaatggctaagggaaggcagcgccgcgacaatttcgaggatatttccagttattcctcgaagcgcgccgtgcgcagaaatcaaaagaagaaaaaaagaacggggctgaaggtttttctcagcatcctgtgcgtcttgttcgttttggtcggcggtgttttggtttacgcttccacgtttatgctgggcgagctgaaaacgacgacgatcacaaaggataaggaggagctcggcatcacgaaggaggcgcaggcgcagacagagcaggcggccggcatcacaaacatcgcgctgttcggcgtggacgcgcggtcgtatgacggcacgttctccgggcgcagcgatgcgatcatggtgctgacgatcgacaacgagcacgggaagatcaagctgacctcgatcctgcgcgatgtgcgcgtctatatcggcgaggaatgcgcctatgacagcggctatgacaagctgaaccacgcgtacgcctacggcgggccggagcttgcgatcaagacgatcaaccaaaatttcggcctcaatatcgaagattacgtcaccgttaactttgccgcgatggcggagatcgtcgacgccttcggcggcgtggacatcgaagtgacggacggtgaaatttcggagctgaatgcaaatctgacaagtttggcggcagaaagcccggaatccctgtccggcgaagccattccgtacaccggcagcgccggacttgcgcatctggacggcaatcaggcggtcgcctacgggcgcatccggaatatcggcgacgataacgggcgcgtcgagcgccagcaggaggttctttccgcgctgctcggcaagctcagttccatttctaagctcgaatatccgggcctgatcagcaagctggcgccgctgtgcgagacctcgctttcctttgacaagatcctcggctttgcgccgatcgtgctgaacggctttgagatcgagcggctttcgatcccgagcgacgaggagggctatgaatccggctacggcgagggcggcggctggatgtggttctacgacgtagatcaggcgggcgcacatatccgccggtttatctatgaggataaggttgtggaataaacggatgtttccggcatatccgcggcgcagcgcggccggcggcctttgcggacttcggctgacgccgcagcagtatcgatagcaatgtgaggaaaaggtggtttttatcatgcagaaaccgattctggtcgttatggcggccggcatgggcagccgttacggcggcctgaagcagatcgatcccgtcgggaaaaacggcgagatcatcatggatttctcggtgtttgacgcaatgcgcgccggcttctcgaaggtggtttttatcatcaaggaagagctgtacgcggatttccgcgcggtcgtgggcgaccgcgtttcgaggtacatgccggttgaatacgcgtttcagcggcttgaggatcttccggcaggctttgcggttccggaagggcgcgtaaagccttggggcacgggacacgcggtgctcgcggcgcgcgggcatatcgacgcaccgtttgtggtgatcaatgcggacgatttctacggtgccgaagcgtttgcgaagatcggtacatttttgcagcaggcgacggcagacggagaaaagtcgcactgggcaatggtcggctaccatctcaagaacacgctgaccgaaaacggtcatgttgcgcgcggcgtctgcgtggaaaaggacggcgttctggacaccatcgtcgagcgcacgcatatcgagcggcgcgctgagggccccgcctacacggaggacggcggcgagagctggaacgcactttccgaggatgcgacggtttccatgaacctgtggggcttcacgcaggagtttatggcggatctggagcggggctttgcggcgtttctcgaaaatgaggtgccgcagaatccgctcaaagccgagtattttctgccgtttgtcgtcaacgaccggatccgtgcgggcgcggccgacgtgcaggtgctgaaatccggcgacaaatggtacggcgtgacttataaggaggataagccggtcgtcatgcgcgcgctggcggatatgatggaaagcggcgtttatcccgacccgctctggaagtgacccggtcgggcgaagtgtgaggaggtctgaaaatggcggatgaatttacgaaagaaaaggttctttgggaggggcggaagcactggctctggtttccgttttccttcacgaagtattcgctgacggaagatcggttttacagccagaaggggcttttgagcacgcactacgacgagctgctgctctaccgcgtgacggacatctgcctgacgcgtacgctcgggcagaagctctgcggaaccggcacgatcacgctgacctgcaagggcgacgcacagcgcatcgtcaccttgcggagtatcaaggattcgatccgcgtgaagaacaatctttcgcggcttgtagaaaaggcgcgggaggagcgcggcattgtcggccgggagtttttcggccccggcggcgacgagctcgacgaggatcccgtgctgtgagaaatgaaaggggatggcgtaacatgatgaaaaaaatgcaggccctgacggccggactgttggccgcatggatgttctgcggcttcgcgccggtgatgccgacaggcgatacacgcccgttcggactgatcatcgcgatcgtcgttatttcggggctggcggtggccgggctgattgtctggcttgtcctccaaagcaaaaagggaaagcattcgaagcgcaaccgcccgtaaaaggggcggagggaccgccttgggcggtccctttttcgttgtgcggggaggccggaaagctgcctgcttccggttttccggcagccgcggccgcagcttcaaacgccagcttgcaaaagcgcgcgcgagccggtgcgcgctgaaggcggggacagtgcgggagaggcggcgcggcattgtgcacggccctttcctttttttgtgtgattcagcgctttttctgcggaaatctgttttttccctcttgcagaaaccccgaaaaaaagctataatgaagaaaatcagtaatatggcattctgcgggatgcaggcggtgcttcaagcgcctgcatccggcgttgtctgccaaataaactggaaccgaaaggagtaccacttatgaattattccaaagaagtggaaatgatgtgcactgtagccaagggcccgaagcacggtccggctccgatcccggaagagggcaagtgggtgcaggcaaaggaaatcaaggatatttctggctatacccacggcgtgggctggtgcgcgccgcagcagggcgcctgcaagctctcgctgaacattaaggacggcgttatcgaagaggcgctggtcgagaccgtcggctgctccggcatgacgcattccgcggcgatggcggcggaaatcctcccgggcaagaccgttctcgaggcgctcaacaccgacctcgtatgtgatgcgatcaacaccgcgatgcgcgagctgttcctccagatcgcctacggccgttcccagtccgcattctccgagggcggcctcgtcatcggcgcgggcatggaggatctcggcaagggtgcgcgctccatggttggtacgatgtacggcacgaaggataagggcgtccgctacctcgagatgaccgaaggctactgcaccagaatggcgctcgacgccgacgatcaggtcatcggctacgagtttgtttccctcggcaagatgacggacttcatcaagaagggcatggagccgaacgaagcgtatgagaagtctatgggtacatacggcagattcaatgaggccgtcaagtacatcgacccgcgcaaggaataaggagggcatggagaatggctacttttgaaggttatgagagacgcgaggcgaagatcctcgaggtcctgaaggaatacggcatttcctcgatcgacgagtgcaaggcgatctgcgaggaaaagggcattgatccctataccatcgtgcaggaaacccagccgatctgctttgagaacgcaaagtgggcctacacggtcggctgcgcgatcgcgatcaagaagggctgcactaaggctgcggacgctgctgctgcaatcggcatcggcctgcaggcgttctgcatcccgggttccgttgcggaaaaccgtaaggtcggtctcggccacggcaacctcggcaagatgctcctctccgaggagaccgagtgcttcgcgttcctcgcgggccacgagtccttcgcggcggctgagggcgcaatcaagatcgcgctgaacgcgaataaggtcagaacgaacccgctccgcgtcatcctgaacggtctgggcaaggatgcggcgttcatcatttcgagaatcaacggcttcacctatgtggagacggagttcgatccgtacgcagaggaagtcaaggttgtcagcgagaaggcatactccaacggcccgcgcgcggacgtcaagtgctacggcgcggacaatgtcccggagggcgttgcgatcatgaagctcgagaaggtcggcgtttccatcaccggcaactccacgaacccgacgcgcttccagcatccggttgcgggcacctacaagaagtggtgcgttgagaacggcgtcaattacttctccgtggcttccggcggcggcacaggccgtacgctccacccggacaatatggctgccggcccctcctcctacggcatgaccgacaccatgggccgcatgcactccgatgcgcagttcgcaggctcctcctcggttccggcgcacgtcgagatgatgggtctcatcggcatgggcaacaacccgatggtcggcgcgaccgtcgcgtgcgcggttgccgttgaagaggcttccaaataaaaacaggcgcgaaagcgttttggctccgtccggcttcgggcggggcctttccttttgcccggctgcttaaaacagagataattcatgttgacgagggcgaaaaattgtgctattataaaagcaaaattctaagtccaaggagatggttttgtggatccgcttccccgatgtaattgtgggagagctgtcagaaagcctttgaggtattatcagcgcgaaccctgtgccgcagacagatcccgcctttttgcggttgatctgaactgaccggtttatgtgcacaggcggcttatattattttggaggctagttatttatgtctgatattgtcaatcaattacttttacagcttgttctgatccttttgaacgctttttttgccgcgacggagatcgccgtgatttcgctcaatgagaagcggatcaaggcgcgcgcggacgacggcgacaaaaaagccgtgaaaatgctccggatgatcgaggagccgacgcgcttcctctccacgatccagatcggcatcacgctcgcgggcttcctcggctcggcgtttgcggccgataactttgcggagcggctttcagattttttcgtcgaaactttcagcattccggccgcgtataccggcgccatcaatacggtggcggtcatcgtgatcacgctgatcctctcgttcttcacgctggtgctcggcgaactggttccgaagcgtatcgcgatgcggcataaggagaagctggcggaggctgtctgcggggtcatctcattcctcgccgtcgccttgaagccgattatctggctgctcacggtttctacaaacgccgtgctgcgcctgttcggcatcgacccgcatgcgaaggaggacccggtttcgaccgaggacatcgtgctgatgctggatgccggcgtcgacgagggctcgctggatcggaacgacatcgaatacataaagaatgtctttaagctggacggcatgtccgctgaggatgtgatgatgccgagaaaggccgttgtgttcgtctctctggacgcgacggatgcggagatcatgaagaagatcgaggaggaaggctactcccgcatgccggtatacaccgaaaaggaggaccacatcgttggcattctccacacgcgcgactatctcctgaagcacgggaacgccggcttcaagctggagcaggtgatgctgccgccggtctttgttccggaaacggcgcaccttgacaccctgtttacggatatgcagaagagccacaaccacatggtcgtcgtcgtgaacgagtacggcgagacggcgggcatcgtcacgatggaggacattctcgaggagctcgtcggcgagatctgggatgagcgcgacgaagcggtggaggatttcaaaaagaccggcgaaagcatgtacaccgtgctttgttcggcctttatagaggatttcttcgagttcttctcacttgaaaatacgggggagacggaggcctcgaccgtaaacggctggcttgcagagctgaccggaagcatcccgaaggtcggctacacgttcgactatcagggactcacgatcaccgtcacgaaggcggacggcctgatggcgaaggagatcagcgtacaggtcaacagtccggcggctgtggaaaaagcagcggaataagacaaaatacagcgggcaggcgcgttcacagcgcccgcccgcttttggcatgccggggaagcgcgcggtttttgttgcggtttcccgcgttttttggtaagatagagaaaagtcccgtgtgaaaggggtgcggccgttatgaatacgtttgaaaagctcgaggcgctgacggcgcttgcagagcaaaatgagtcgctgcgcaggagactgctcgagacgcgcgcacagcgcgacccgctcgccgagttctgccggctggcgcagaaggcaggcgtcgcgctgacgcccggcgagctgttcgctgtggggcaggagtattcagacaaccagtgcaagagcacaaacggcggaaatccgacgccgtacgacgcgtttgacgacgcctacgagaactttctcgcgtcgatttcctgaaaaaggggagcaagtgtgaaatacctttcacacagcgtttttgtgcctttgcagcagagtgaaagcggcggacggcctcgccggtcggcacaaattttgaaagagaggataagcctttgcgccgcagaggcatggtgatttttatgcagtacctgtgcagcctgacgacgctgccgcacgtcagttttatgaattatttcagcccgaagggggagtgggtgcatttccgccggcgaaacgtcgaatacatcatgtattttatcgccgagggggaaatgcacattcaggagaacggcgtggagtacgtcctgctgccgggcgacgtgttttttttgcagccgtacctcgagcacgtcggcacgcgcccggcggaatgcgcctactatttcgcgcatttcagcaacctttcgcttctgccgttcgactacggcgagggaacggcgctggagatcgccgaccacaagctcgccgaggacaccgtggacagcgtgttcgattttgagcactgcatgctgccgaagcacatccgcgtgcgcgacgaggccgtgcgcgcgcagcttgcggcactgtttgaggcgtgcatcgagaaggggcgttcgggcgcgaagcactaccgcgtgttctgggcctgcaagctgctcgaaatgctgacgacgctcgcgcagaacagcctcgacgccaaggccgaggccatcggcagcgcgctgcccgcgcgcacggtggggaagattcacgatctatgcgcctatctggacgcacactacgcggaaaaaatcaccggcagcacgatcgaggcggaggcgggcatgaatttcgactacctgaaccgcacgttccgccgtatcacgggcaaaaccgtgtttcagtatctgaactgcgtgcgcatcaaccgcgtcaaggagcttttgaaaacgacggacatgaagctcgctgaaatcgcagcgctgaccggcttttccgacgaattctacctgagccgccagttcaaaaaagccacgggcgtctccccggtgctctacgcgcgcggacagatgaaaaactgaggccggatgagcggcctgcggccgtttgccgcagatgtgtgccttatgtgacgcgcggccttatacctgaacggcggtgcggctgaattgcgcatgggcgcactgccggcgatttcaaatgaaagaatcccggagaaaccagaaatcggttttctccgggatccgtttatgtgtgccgaacggtgcggttacggttcctcttcgatgtacgcctcgtcgtagtcctcctcggccggctcgccgcgcacgatcagcaggcgcgaaaggcgctgatcttccacggagagcacggtgatgtcgaggttcttcacctgcacgctcgggtgctcgccctccttcgggattcgcccgagcaggtcggtcacgaggccggcgatcgtgtcgtaatcgccttcgggcagctctacgccggtcaggtcggagatctcgtcgatggaggtcgtgccgtccaccgtgaattcgttttcactgacgcggaagatctcctccgcctcgttgtcgtattcgtcctgaatgttgccgaggatcgattcgatcagatcctccagcgtgatgaggccggcggtgccgccgtattcgtcgacgaccacggcaatctggatgcggcgctcctgaaattcgcggaaaagctggctgcacttcttcgactcagggataaaatacgccgggcgcagcatgtcgcgcaggtggatgaacgacggcacgggctttccgacgtacggcagaaaatccttcgcgtagcagatgccggcgatcgcgtcaatgtcctcgcggtagaccggcaggcgggagaagccctcctcggcggcgaccgacgtgacgtcctcgatcgtcgcgctttcgctgacggcgcagatatccgtgcggtgcgtcatcacctcgctgacggtcgtgtcgttgaaatcgaggatattcgtgatcatgtcgcgctcggtttcctcgatcacacccagctcctcgccctcgccgaccatgtggaggatctcctcctccgttacggtttcgtcgagcgccttcgggtcattgccgaaaagccgcatgatcccgtcggagataaagtcgcacagcttcataaacgggcgcatcagggcactgagcacgcggatcagccggatgagcttgtagctgtagcgcgtgttgcgcgcggatttgtgcgccacgaattttttcggcgtgaaatccgcgagaagcagaaacagcgcggcgcacagcagcgtgcagagcacgacggcggccggtgcggcaagcgccggatacaggccggcagcgatcagcgcgttgtcgagcacgggcgcaaagccgatcaccgaaacgccgatcgagaaaaagcccatcagcatcatgccgaattgcaggggcgaggcgaagctctcgttcgcgtcgagataggcaaggaatttcttcgcgcggcggctgccgctctcggcgtcgcgcttgacgcgcgattcgctcgccgtgccgacggcggattcgcacatggcatacagaatgccgaggaggaaaaaggcgagaagcagcgcaatggcggctggaagcgggagaatggaggctgcgggcgtcatagtgccgtacgggtcgtcgttcatggtgtggcttgcatcctttccgtctgaagcgttttcagttttatagataccaaaattttaccgcaaaaagccccctttgtcaactcaaggcgccgcggtgcgccggaatgcggcggcggggccgggaaaaggcgcggctttgcgggaagcctgcggaaattgcgggcataaattaaaaaaatcattgttttttcctttacatacgggcgaaaaaatgataagatttaactgaacggcaaggggacggcctgtgcgtccggcgctgcaaacggcggcacggatacagaaggcccgctttgccgcgggcacattccaattgataatccttaaaggaggaatttattaaatggcaagaaaaatgaaaaccatggatggcaacaacgctgccgcgcatgtttcctatgcgtttaccgacgttgctgcgatctatccgatcacgccgtcttctgtcatggctgatgagaccgataagtatgcggctgccggcagaaagaatcttttcggccgtgaagtccgcgtaacggagatgcagtccgaagccggtgcggcgggcgccgtgcacggctctctcgcagccggcgcgctgacgaccacctacacggcgtcgcagggcctgctcctgatgatcccgaatatgtataagatggccggcgagctgctgccgagcgttatccacgtttctgcgcgctgcgttgcttcccatgcgctgaacatcttcggcgaccattcggatatttacgcgtgccgccagaccggctatgcgatgctgtgctccaacagcccgcaggaggtcatggatctcggcgcggttgcgcacctctccgcgatcaagggcaaggttccgttcctccacttcttcgacggcttccggacctcccatgaggttcagaagatcgaggtttgggattacgaggatctcggcgaaatgctcgattgggacgcggtcgatgcgttcagaagaaacgcgctgaatccggagcacccggttctccgcggtcaggcgcagaacggcgacatcttcttccaggcgcgcgaggcctgcaacaagtattacgacgcgatcccggcgaccgtcgtcgagtacatggacaaggtcaacgcgaagatcggcacgaactacaagccgttcaactactacggcgcgccggacgcagagaaggttatcatcgcgatgggctccgtctgcgagacgatcgaagaggtcatcgactacatgctcgccgcgggcgagaaggtcggcctcgttaaggttcacctctacagaccgttcgttgcgaagtatctgctcgacgtgctccccgagacggtcaagacgatctccgtgctcgacagaacgaaggagccgggctccatcggcgagccgctgtacctcgacgttctcgcggcgatcaacggcacgcagttcggctgcgcgaaggtgctcacgggccgctacggcctcggctccaaggatacgaagccggctgacatcatcgccgtttaccgcaacatggagaagggcgacgacgcgaagaagaagttcaccatcggcattgtggacgacgtgacgcacctctctctcgacgcgacggagcatcccgacacggcgccggcaggcacgaagtcctgcaagttctggggcctcggctcggacggcaccgtcggtgcaaacaagaattccatcaagatcatcggtgaccacaccgacatgtacgcgcagggctatttcgactacgactcgaagaagtccggcggcctgaccatgtctcacctgcgcttcggccacacgccgatcaagtccacctactacatctcgcaggctgacttcgtcgcatgtcataacccggcataccttgagacctacgacatggtgcaggatctgaagaagggcggcagcttccttctgaactgcccgtgggatgccgcggagcttgaggagagactcccgggcaaggtcaagaagtttatcgccgacaacgagatcaacctctacacgatcgacggcttcaagatcggcaaggagatcggcctcggcacgagaatcaacacggttctccagtctgcgttcttctccattgcgaagatcattccggaagaggacgcgatcaaatacatgaaggacgccgctacgaagtcctattcgaagaagggcgaagcgatcgtcaagatgaaccacgacgcgatcgaccgcggcgcgaccggctacgtgaaggttgaggttccggcttcttggaagaatgctgtggacgattccgtcaagcacgtcgcaacaggcgaccgcccggacctcgtcgagtacgtcaacaacgtggtgatcccggtcaacaccttccacggcaaggatctgccggtttccacctttgagaagtatgcggacggcacctccccgcagggcacctccgcttatgagaagcgcggcgttgcagtcgatgttccgaagtggattccggaaaactgcatccagtgcaccttctgctccatggtctgcccgcacgcggttatccgtccggtgccgatgacagacgaagagcttgcagcggctccggcggctgtaaagagcaagccgatgaccggcatgccgggcatgaattttgtgatgacgatctccacgctcgactgcacgggctgcggctcctgcgtcaacgtctgcccgggcatgaagggcaataaggcgcttgcgatgtccccgatcgacgaggagcgtccgagccaggaggtctttaactacggcgtcacgctcgacccgaagccggaagttatggagaagttcaaggatacgacgatcaagggcagccagctcagacagccgctccttgagttctccggcgcgtgcggcggctgcggcgaaacaccgtatgcaaagcttgtcacacagctcttcggcgacaagatgtttatcgcgaatgcgacaggctgctcctctatctggggcggttccgcaccggctacgccgtataccgtcaacaagaagggccacggcccggcatggcagaactccctctttgaggacaacgcagagttcggcctcggcatgacgctcgcgcagaatgctgtccgcggccgtctggcacagctcaccgaggagctcattgcagtcgattactgtgtcgcagagctgaaggaagccggccagaagtggctcgacacgatggatgaccgcgcggcaaacggcccggcggctgaggcgtacatcgcggcgctcgaaaacggcatcgtcggcgtcgacgagggcatcgagttcaccggctccgagcagggcaaggcagccttcggcgatcaggcggcgagcatgcacgagcacttcaaggcgctgaaggcggaaggcaagacgcattgcgactgcgaggcctgctcgctggcggcaaagattctgaaggacaaggacttcctcgcgaagaagtccatgtggatcttcggcggcgacggctgggcatacgacattggcttcggcggcgtcgaccatgcgctcgcttccggtgaggacatcaacatcctcgtgttcgacaccgaggtttactccaacacgggcggtcaggcttcgaagtccacgccggtcggctccgtcgcacagtttgcggctgccggcaaggccgtgaagaagaaggatctcgcgtcgatcatgatgagctacggctatgtctacgtcgcgcaggtcgcgatgggcgccgatatgaaccagtgcctcaaggcgttccacgaggcggagagctatcatggcccgtctatcgtcatcgcctacgcgccgtgcatcaaccacggcattaagggtggcatgggcgtctccatgactgaggagaagaaggcggttgcggccggctactggcacaacttccgcttcgacccgcgccgtgcggacaacggccagaacccgttccagctcgacagcaaggcgccgagcgcttcttaccgcgacttcatcatgggcgaggtccgctacaacagcctcacccgcgcgttcccgcagagagcggaagttctcttcgagaaggctgagaagtatgctgaggagaagtacgcgaagctttccaagatggcggagtaatttcggcattcgcttcgatccataaataacagagtcccgtctgcttttgcaggcgggacttttgcgtccggctggttcggtgccggtgcaggagagatacgttttccagttcagtgccgggggcggtgtgcacggcgggcggggaaaccgcgcagggcggccgggctgtgcggaacagtgcggcgggagggatccatttatggcatgttggatacaggcgctagaaaaccgtgcgcggcggtgtggaggtatgtgccgaggcggtgcgggcggcgggcatgcgcggttatcctcccgtgcggggcgcaaaatttgatgggagagaaatggccggccgcgcaggcggcggagctgcatgccgacgctgtattttcgggtattgcttttgcgcggcagacttgctatactggtagcaggataaactgaaagggtggagttctatgatttatacgggctgtcagctttcgagcgttgcgccgtacctgcaaacaggggagtcgctgcgccgggcattggagaagatcgcggagatcggctacacggccgtgcagcttcagggcgcgtccatggatataccggacaaggagatcgcggcggcgctgcgcgaaaccggattggactgcgtcgcgacgcaggaggattacccgttcggcttcggggaaaacccgcagcgcgccatcgcgcgcgccgtggcctgcggctgccgctatctcacatttgcgctgctgccgagggaggcggatacacccgaaaagctagagcggtttgcggagaaggttcggaagatcggcgaaatggtcgccggggcgggcctgatctttgcgtttcacccaatcggtccggacttccggcagatggagggcacgccggtttatgagcggctgatggcgctgctgccgccggacatgcagctgactttctgcgtgcacagctgcctcggcagcggcatctcttatgcggaggtgctggagaagttttctgggcgcgtcgatctcgtccattttaaggacagcatcccggggccggacggcaagccgcagctgatgccgctgggtgcgggcagcgtggactggcgcccggttgcatcgcagtgcgcggccgcgggcgtgcggtggattttcgccgagcaggagcgctggcagaaggacgccttcgtgtgtgcggcggagagctatgcctatatgcaggggctggcacacagcctgtaagcacacaatagagagcacccggacggttcaaaaatgccgttcgggtgttttttgcgcatgaaaacgcggcgctttgcatagaaatggaacacaacaaaggtgagggtgtgttacgatgaagcaaagtgtcgacgacagagctgccatgcttggggaatatatcgtacaaaacaaggcgacggtgcggcgcgccgcaaagcagttcggcgtcagcaaatcaacggtacataaggatgtggcggagcggctgcgccatgtcaacctcggactgtacaaagaggtgcgcgacgtgctggcggtcaacaaggcgcagcggcacatccgcggcggcatggcgacgaagcgcaagtacgagcataaaaattagagaagcgcccgcggcgcgcctgtgaaaagcactccctatgttagtttcggggtatcgtaactgcctaactttgggggtgcttttcagcatgcgccgcgggcgctttttgtttttaattttttgcgcttcagtggggcagctgtgatcgggcgggataaatcacagcgggacttgccctgcgtttgttcagcgcatccggctgttgtggatgatctccgtcatttcccgatgccacgtgtgctcgcgccacatgccgacgaactgcgggccgcagaaattgctcgtcgccatgccggcccagcagccggttttggcggccgtcgtaacgccgaggcggttcaggtcgagaatccagtcccagtgcagcagggggccgtccttgtaatcgacgatcgcccagcattccgtcgtgacgagcggcttgttgttgcggcgggaccattcggcgacgcgctcgatctcgtcgatcaggcactggtcgtaatgcgccttggattcgcggtagatgcgctcgccgttcaaagccagattgttgtagccggtatcgtcgaaacgagcgaaatcgtagtgaaccttgtcgtaaaattcgctggaattcgtcatccagacatgcggctcgatgaaatcgaggaagctcacgtcctcgtcgagatcccggaacggcgcggtgaacgagaaggtgacggggatctgcggataggccgatttaaactctgcgatggcctccttcatccagcgcacgcagagcggggagtcgtgtccgccgcgctcataccgtgtgaaaaagggggcccagcaggagagcggaaactcgttgcacagatccacgtacaggatgttgtccagctcgccccacgcgcggatgtaatcgagcgttttgatccagatgcgtgcgtgatcctgcgccgtcaggatactcatgcaggtgttgtccagatcctcgcggaaccatgtggagagcgcaacgcggacattgtgacggcggcaggccgcgagaaagccgcggaaatcatcgtgcagcgtgatcttgttgacggagcggctgccccagtcctgcgtgttccagaccggcttgagcgtccactcgcggtgcgcgtcccatgccatgaggtgcgggaacgcgtcgatgcgcacggcgtcgtagccgcggtcggtcagctctgtgagggcctgatcccaatcctcatagccggcgcccggccagcggcgctcgatccaagagaattcccacatcgtgatggcgaaggggcggtcgattttgaaaagctccatggctttttctttcatggattgcataagaactcctgcctttcctgctgcgccatgtgcgcagtacagataaatttgcggttgctcccattataaaagagaatgggcggggcggcaagatggtgttttccacaagaaaaaagccccgctttgtcggaaaataccaaacaaagcgaggcggaaagccgggcattacaataaagtggaagatcaagagagaacgggtgcttcctctttgagggcaggctctgcggcggggagcggcgccgcggattccggcagcctgtacttatcggcatagcgcttgtaatagccggtgtagcgcggctcgccggagctcttgatctcgttcagatagccgtgcgtctccattgcggaatccttgatctggatcatgcaggccgcaatattcgagcagtggtcggaaacgcgctcgtaattgttcagaatgtccgagagcacgaagccgagctcgatcgtgcagcggccatcctgcagccggcggatgtgccggtttttaagctcgagcttgagcttgtcgatgacctgctcgagcggctccacctcgtaggcgagctgtaagttgttttcgtcgaaggcgtcggtcgtgatgttcaggatctcgacgacggcgctagtaaaaatctcaagctcctgctgagccttttcggagaatttcaggttcttgtcgtgcagttcgcgcgcgacgcgcagcaggttgacggcgtggtcgctgatgcgctcaaaatcgccgatcgtgtgcagaagctgtgaaacgtcgttgctgtccgcactcgagaggtttttgctggagattttgacgaggtaagaaccgagcttgtcctcgtaattgtccacgatttgctcgttgcgctcgatgcggtcggcggtctttacatcgaaatgcgagagcaggctgaccgcgtcgagcagcgtgctgcgggcgagatccgccattttcaccgtcgcgttgcggcattcaccgattgcaaaagagggcgagagcaggaggcgctcgtcgagcaggacggcatgcgggtcgtcctctgcggcgccggccttcacgcgcttgtcgcgcacggtgagcaccgcgagcttctcgagctgcttgcagaacgggagaaggataaccgtggtgatcaggttgaatgcggagtgcaccacggcaatcataaacgaggagatgggctggtcggtaaaggcaaaattaaaaatactgtcggcgatataaaagccggaaaggcagatgactgtgccgatcacgttgaagtagatgtgcacggccgtcacgcgcttcgcgtttttcgaggtgccgatcgaggagagcagcgccgtgacgcaggtgccgatattctggcccatgatgatcggcagcgccatattgaaggaaatgctgccggtcagcgcgagcgactgcaagatgccgagggaggccgctgagctctggatcagcgccgtgatcagcgtgccggcgagaatcgcgacaaacgggttgttgagcatcatcaggatgtccctgaactgcggcaggtcggcgagcggcttcaccgcgccgctcatcagcgtcatgccggtcatcaggatcgcgaagccgacgcagacggagccgatgtcctttttcttgctgctctttgcaaacatgatgagcacaatgccgagcagcgcgatgatcggcgaaaaattctccggctttaaaagctggatgaacacattgtcgctcgtgatgcccgaaaggctcaggatccacgccgtgaccgtggtgccgatgttcgaccccatgatgacgccgacggactggccaagctccatgatgccggagttcacgaggccgacgagcatgaccgtcatcgccgaggaggactggatcgcgatcgtgatgcccatgccgagcaagaggctcttaaagcggttggaggtcatggagcgcagcacgcgctcgagccgcccgccgaccattttttcaaggctggtagacagcagatgcatgccgtataggaagaatgccagaccgccgaatagcgtgataacggaaaatatgtccattgagtttgcagctccttcgtttgccggaacgaccgttttcgcaaaaattaacgctttttttacttatttctcatatacaagctcattttagcatagacataactgcaaattcaatgcctttttcggaaaaagcggctttccgcacaaatttgtgcagtacgcaacatttcttgacggccaagggggaaaggcgttataatggtgacaaagaatctgtgcgggaaaggggcgcgccgcgtcccttgaagcgggcctgcgctgcgggcggcacggtgcacccgggcgggcgcggacgggaaaagaaagggtgatcgggatgaagatcagtgcggtgatcgtcgcggcgggcggctccacgcgcatgcggtcgggcggcgcctccaagctgatgatggcggtcggcggcgagccggttctgcggcgcacgctccgcgcgttcgatgcggcggcctgcatttcagagattgtcgtggtggcgcgggaggtcgattttgaagatgtccgccgcgcggcggacggcctgcgaacgccgctgcgcgtcacggcgggcgggcgcgagcggcaggattccgttgcgaacggcgttttgctctgcggcggggcggattttatcgcggtgcacgacggtgcgaggccgtttgtgacgccggctctgatcgagcgcgtctgcgcggacgccgtgcgcttcggcgcggcggcgctggcggtgccggtcaaggatacggtgaagatcgcctccgaggaggaatttgtgcaggccacgccagaccgcgcggcgctgcgggccgtgcagacgccgcaggtgtttgagcgccggctgtatctcggcgcgctcgaccgcgcggcacaggacggcaaaagctatacggacgactgccagctgatcgaagcggcgggcgggcgcgtgtttctgacggccggcgactacaaaaatatcaaaatcacaacgccggaggatctgctcgtggccgaggcgttcgccgcggcagagagcggcgcggcagtgcgaaaagagaaaggcggtcaataaaaatgagaatcggacatggctatgacgtgcacgcgcttgcggagcaccgcgatttgatcatcggcggcgtcaagatcccgcacgagctcgggctgctcgggcattcggatgcggacgtgctcgcccacgcgatttcggacgcgctgctcggcgcggcggcgctcggggatatcggcgtgctgtttccggacagcgacccgcagtatgagggggccgacagcctcaagctgctttcggcggtcgtcgcggcggtgcgccggcggggctttgcgatcggcaatatcgacgcgacggtcgttgcacagcggccgaagctgcgcccgtacatcgaggagatgcggcgcaacattgcctcggcctgcaatgtgggcgtggactgcgtgaacgtcaaggcgacgaccgaggagtgcctcggcttcacggggcgcggcgagggtatttcggcgcatgcggtctgcctgctcgtttgagccgggcggattttcctccggcaggcacaaaccggcggcttgtctcatatcctgatcgtgaacggaaaaagggatattgagaaagcagaggtgctaactatgggaaatcagatggaccgggggggaaggccgtttatcgtggtcagcagcgtgacgtatgcgctcaagagccgcgacctgctcttttcgcgcgggatcaaggcgtatgtggagcggctgccgcgcacgcgggaaaacgggtgcggatacggcctgtacgtgccgcagcacgccgatgcggctgaacgcattctgcgggaggcgggcgtgcgggtgctgttccgcacggagcggggcgcatcgtcatgatttatctcgataacagcgcgacgacttacccgaagccgcaggccgtgcgcaggcgcatggcggaggcgctcgagcgcttcggggcgaatcccggccgcgggggctttcgcatgagcatggaaaccgcggaggccgtctacgccgtgcggcgcagggcggccgcgttttttggcgcggaggggcccgagtgcgtctcgtttcagccgagctgcacgcaggcgctgaatatcgtcatccactcgttaaagccgggcgaccacgtgctcgtcaccgatctcgagcacaatgcggttctgcgcccgctcaaggcgatggaggcgcagggcgtttctttcacggtcgtgccggtcacgccgtgtgacaatgacgcgacgctcgacgccttccggcatgcgcttcgcgaaaacacgcgcatgctcatctgcacgcaggcctcgaacgtgtggggcatccgcgtgccggtggagcggcttgccgcgcttgcgcacgtctacggcgcggagatctgcgtcgatgcggcgcagtccggcggcgtggtgccgatccatgccgcagaggacggcatcgactacctatgctgtgccggccacaaggggctttacggcccgatgggcaccggcatgctgatcacccggcagggggagaagctcaaaagcctgattcagggcggcacgggcacgctggccatgcagctcgaacagccgcgggacatgccggaatacctcgagagcggcacgcagaatgtgccgggtattctggcgctcggcgcgggactcgatttcgtgcgcgcccgcggcgaggagaacgtgcggcaggccgagatgcggcatgtccgccgcatctatgaggcgttcagcaaaatgccgcatgtaaagctgtacacgccggcgcccgacgcgcggtatttcgtgccggtgctcggcttcaatgtgcgcggcatggcgagcgagacggcgggcgacctgcttgcgaagcgcggcatcgctgtgcgctgcggcatgcactgcgcgccgttcgcacacaggaagatgggtacggacgacgcggtgtacggcggcgcggtgcgcgtttcgccttccgtctttacagatgaccggcaggccgccgcgctgatccgcgcggtggcggagctgcgggcgtcggacacggcgcatcaaaaatgaacgaaatgtaaataaaggccgcgcggcgggaatcgacgggaaaaatcccgctggcccccttttcatgcgcggcgctttatgataaactgtatatagattatgcgcgcagagcaccgccctgtgcgggcgcgcaaaaagaggtgaaggacgtggaaggttttctcggcgcagttgcgtcctggtgggaaggcgtggtcggaatcgccaaaagcttccagctcaaagatgcggtagacatcctgattatcgggctgctcatatacggtgcgatcaagctcgtgcgcgagacgcgtgcgggccagcttgtcaagggccttttgctgctggtgcttctgttttttatttccagcaatctgcaccttgtcatggtcaatcagatgctgtattacgtgttccaattcgcgcttgtcgcgatcctgatcgtctttcagcccgagatccgcaaggcgctcgagcagatggggcgcagcagcaacatgagccggtcgatcgcggatgcggtcggcgcgcgcgacaaggacagcgagaagcagcgcatgcgcaaggcgatcaattcgattgtggacggcgtgggcattttgcagcagcttaaaatgggcgcgctgatcgtttttgagcgcaagacaaagctcggcgatatcatcgagacgggcacgcagatcaactgcgagccctcggggcagatcgtcggcaatattttcttcaacaaggcgccgctgcacgacggcgcaatgattatccgcgacggcatgatccatgcggcgggctgcattttgccgctgacgaagaacgcttcggtttccgccgagctcggcacgcgccaccgcgcggcgctcggcgtcagcgaggaatcggacgcggtcgccgtcgtcgtttcggaagagacggggcagatctctgtcgcggtcaacggcgtgctcgcgcgccgcttcacgcgcgatacgctgcgcgatgttttggaaagctatctgatcccgcaggaggaaaagacgtccacggtgagccgcggcctcagcttccttctgggtaaaaggacggtgaaaaagtgatgccgggcaaaaaggaaaaaaacgaacagggtgaaaaaaagcgggtcaaggtgctgcgcgcctttgagaacaatacgctgctgctgatcttctcgctcttgtgcgctgcggtgatctggttcatcatgatggcaacaagtggcgagagccgcgcggtggttgtgcgcaatgtgccgatcagcatccaaatgtccgagacggcgcaggaggcgggcatccgcattttcgaccgaagctatctcacggcggatgtttcgattacgggcagttcgctgatcacgaataaggtgacggcggacgaccttgaggtgaccgcggtattcgacccctccgtcacgatgctgaccggtaattcgatgcagcaggcgtccttgcagctgcgcgccgtcaagaagggcaacacgatctcggagtacgaggtggagagcgtttcgccggcggaggtctccgtatcctacgacaagtacaaggaagtgcagctctcgctcgagacggacatcgaatacaccgtggcggagagctactacgcccctgcggcgccgacgctttcgaccgagatcgtaacggtatccggcccggagagcgccgtgaaccgcgtcgcgcgcgcggcgctcgtctacacgttctcggatgagctcacgcagtcgaaatccctctcgtgcaaggtcacgctgttcgacgcgaacggcgacacgatcgacccggcggagaactttctcacgctgagcgacagcacggtcgacatttcgatccctgtgacgagccgccagacggtcgagctggtcgccgacatccgcaatatcccggagagcttcgcggagagccgcatcacgattgatcccgcaacgatcgaaattgcgggcgacggcgagacggtctcgaagtataccgagctgacgctcgcgtcgccgatcaatttcctcgacgtgacgccctcgaacacgacgttccaggtggcgatcccggtgccgagcggcgtgacgaacatcagccgcgtggagacggcgacggtcacgttcaacatgaacggctattcggaaagggagctgacgacgaccaacatcccggttgtgaacgcgccggagggcaagacggcggagacgaccacgaggagccttaaggtccgcgtgatcggtacggcggcgcaggtctcgaagctgaccggcgactccatattctgcacggtggatctctcctcggtttcggacccgagcggcaatatcgaggtgcctgtcacggtgacggtcaacaacgcggaatcctgctgggcgaccggcacgtatacggcgcacgtcacggtttcagacgcggccgccgcgcccagtgcagccgcggaataatccataaaaaagagcccgccggcttccgaaatggggaagcggcgggcttttgccgtagcggaaatacgtcagaaaagcgggagaagcggcacggtgacggcggcgtgctccgtgacggtgcggaaccagtcgcgcacggcgacaggaacgccgctggcctgcaaaatgacgatcacgaggatgaccgcggcgaggatggcgagcaccttgagcgcaaacatgtagttgccgcccttgtgctcctcctccgcgtgcaccgcggcagaccttggctcagcccgctccggaacgggcggctgcaccgttttgggctcttgctcttttttatccatgccggcacctctttcctaaaaacgacagatttcgttacttctattctagcacagctttttcgctttttctatatccttttgaagcttttaacagaatattcgcttttgccggaaagcgtgccggaaaaacggacgggactgcgcggtggaaatttggcgaattgcggattttggttgaataatcgccgaaaaaatgttaaaatatctttttagaactgatgataccggggcgtgccggaaaatgctttttcgcgccgcgccttggagaaggatgacccgattatgaatatccgaaactgggaggttcggcctctcgataaagaccgtgcggccgcgctcgcacaggcctataatatcccgtttttcctcgcgatgctcctcaacatacgcggggtggaccgctcggaggagatcgaagcgtttctcggcgcgggcgcgccgctttcagacccgtttctgctcaaggacatggaccgcgcggccgagcgcatcacgcgggcgatagacgcgatggagaagatcgccgtgtacggcgactacgacgcggacggcgtgacctccaccgcgatggtgtacagctacctcgaaacgcgcggcgcggacgtgatgttttacataccccagcgcgagggagagggctacggcatgaatatcgccgccgttgagcatctcgcgtcgctcggcgtcacgctgatcatcaccgttgacaacggtatttcctcgatacgcgaggtggagcgcgcgaaggcgctcggcgtggatgttgtggtcaccgaccatcaccgcccacaggaaacgctgcccgcggccgtcgcggtcgtcgacgcctacagaaaggacgacgagagcccctgcaaggatttttccggcgcgggcattgcctttaagctcttgatggcgctggaggagggcgcgggcgacctcgacgatctgctcgagacctacggcgacctcgcggcgatcggcacgatcggcgacgtggtgccgctgacgggcgaaaaccgcacgctggtcaacgcggggctgcgcctgctttcggagagcgagcggcccggcgtgcgcgctttgctcacggattccggctttaccgggcggcagctcacggcgacgaacgtggcgttcacgctggtgccgcgcatcaatgcgaccgggcgcatgggcgcgccggagcgcgcggtgcggcttctgacgagcgtggatgacggcgaggccgcacggctttccgccgagatctgcgcggacaacgaggagcgccgccgcgtggaggcagcgatctccgaggctgccttcgcggacatcgaggcgcgcgggctttcggaggaccgcgtgatcgttgtggacggcgcaggctggcaccacggcgtgatcggcatcgtggcttcgcgcatcaccgaccgcttcggcaagccgtgcattgtgatttcacgcggcgaatcggaggcaaagggcagcgggcgcagcgtggaggggttctctctgtttgaggcgatctgcgcctgcggcgacctgctcatcaaatacggcggccacccgatggctgcgggcgtgacgctcctaggcgaccggatcgacgcgttccgcgcggcgatcaacgcgtatgcggcggagaaattcccgcagatgccggcgcagaccgtcacgctcgactgcaagctgaacccggcggcgctctcagtcgcgatggtcgagagcctccggcggctcgagccctttggaaacggcaacccccagcccgtgtttggactttacaatatgaacctgtgcgatatttcggccgtgggcggcggcgggcacctgcgcctcacgctggagaagaacggcgcggtgctcaccgcgatgcgcttcaacacaaggccggaggaattcgcgtatgcgccgggcgaccggctcgacctcgcggtgcagcttgaggcgcgggaattccgcggccagcagtcgctgaccgtgatcgtgcgcgatatgaagcccgcgggcttcgacacggagaaaaacatcgcttcgctcgcgcgctacgcggcgtgccggcgcggggaaacgctctctgcacaggataaggtgcgtcttctgcccgaccgcgcctttctggcggcggcgtaccgggcgctgcgcgcgcagggcggaaagcccatagagctcctccggcttgcagcgcggctcgggccggactgcacgctcgggcggctgtgcacggcggtcgatgcgttcgaggagcgcggcctcatccgcagcgcgctttccgacggccggctcacggcagaaattctggaaacaagcggtaaaaccgatattacgcaatctcccgtcctgcgggcgctgcaatagcgcgcaggcggcgccaaataaaggaggagagaagatggcagcagcatccaaaacctatgcggacctcgtgcagctcgcaacgtcgagtggcaaggaatatgatctcgcgctgatcgagaagggctacaaatttgcgctcgaagcgcacaaggagcaggagcgccagtccggcgagccgtacatcatccatccgatcgccgtggcgtgcaagctgatcgaattcggcatggatacgccgtcggtcgttgccggcctgctccacgacgtcatcgaggatacctcgtacacgtacgacgagatcgcgaagctgttcggcaaggaaattgcaaacctgaccgagggcgtcacaaagctcggcaagatcccgttctcctcgcgcgaggagcagcaggcggaaaacctcagaaaaatgctgatggcgatgtcggaggacatccgcgttatcatcattaagtttgcggaccgcatgcacaacctctccacgctcgaatacgtttccccgcagaagcagcgcgacaaggcgctcgaatgcctcgaggtgtacgcgccgattgcccaccggctcggcatgcgcaccgtcaaggaatacatggaggacgtctccttaaaatacctcgacccgatcgcctaccatgagatcgaggagaacctcgaggcgcgcagctcccggcgcaagcagttcgtagagagcacgaaggagctgatccgcagccgcgtgaagccgctgattcccggcgtctacatcgaggggcgcgtcaagagcatcaacggcatttaccgcaagatgttcattcagggcaagagcttcgacgagatctacgacgtgttcgccctgcgcgtcatcgttaacacgatcatcgactgctacaacgtgctcggcattgtgcacgacatgttcacgccgctgccgaaccgctttaaggattatatctccacgccgaagcagaacatgtaccagtcgctgcacacgaccgtcatcagcaaggaaggcatcccgtttgaggtgcagatccgcacgtgggagatgcaccacaccgcggaatacggcattgcggcgcattggaaatacaagctcggcatgacgagcggcaacgaaaagccggattcgctcgaggcgcgcctgcagtggatccgcaacatgctcgacaaccagtccgagagcgaggacgtcaccgatctcgtgcgctcgatcaagacggatctcgcgcccgaggaggtgttcgtgttcacgccgaagggcgatgtgatcaacctgccgatgggctccacagtcatcgatttcgcctatgcgatccactcggccgtcggcaaccgcatggtcggcgccaaggtggaccagaagatcgtgccgctcgactacaaggtcaagaccggcgagatcatcgagatcctgacaacgaaagaggtcggccgcggcccgaaccgcgattggctttcgctcgtgcgcacaagcgaggcgcgcaacaagatccgcacgtggtttaaaaaggagaagcgcgaggaaaacatcgtcgagggcagggcggagcttgagcgcgaattcaagcgcagcaatatcgttttgagcgacgagctgatgcagtttatgctcgacagcgccggccgccgccacagctgcgcgacgccggatgatttctacgccgcgatcggctacggcggcattcagctttggaaaatcctgccgcgcgtcaaggaggaataccagaaatacctgaagcccgccgaaaagcagacggatatttcgcagcagtcgccgcaggcggcgaataaaaaggcggcgggcggcgtgcttgtcgagggcatggataactgcctgatcaagttttcccgctgctgcaacccgctgccgggcgacgagatcatcggcttcatcacgcgcggcttcggcgtttccatccacaagcggagctgcacgaacgtgccgaaggatttcacggcatgtcccgagccggagcgctgggtgcgtgcacactgggccggcgaggtcaaggaggaattcaaatcgacgctgcacatcgtctccacagaccgctccggcctgcttgccgacgtgacgcagcagctctttaacatgcacatttttatccacaccctgaattcacgcgagatcaagaacaccgaaaacgcgctgatctcggcgacgatctcgatcaacggcatggcgcatttgcagcaggtgatcgatcggctttcaaagatccgcggcgtgatttcgatcgaccggagctgagccccggcggaaaggcgaggtttttatgcgttatctctgtatcacgggcggcccgctcgccgaaaactgctattttctgatcgacgaggcttcaggtgaggccgcggttatcgaccccggcttcgtggacgaccggctgctcgccgaggccgcaaaatacaaggtgcgccatattttgctgacgcacgggcacttcgaccatatcgagggtgccggtcgtctgcgcgcgctgaccggcgcgccggtcacggcctttcgcacggaggccgcttttgcggcagacccggggaaaaacggctcgctcctgatgctgaaaaggccgatcacctgcgcggtggaccgcctgctcgacgacggcgagcagttttccgtcggctcgattcaggtgtgcgtcctgcacacgccggggcacacggcgggcggctgctgctatgtcacgcccgaggccgtttttaccggcgacacgctgatgggctattcggtcggccggtgcgacctgccgaccggagatgaagccgcgctggcgaaatcccttcaaaagatcgcggcgctgccgggcgatcccgccatctgcggcggccacggcccggtaacgcgcctttcggaggaaaagcggcggaatccgtacctctgaccgcgcggaaatttttcgtataaggaaaccagcttatgtatctttttgttatcgaccatccataccattatgaggcggaaaatctctgccgcgtcttttttccgttcgacccggtcgtgacgctgcacagcgcggaggcagaggcgccgcagcctcgtgcggtgtacacggcggtggcggacggggcgtataccgtccgcattcaggacgaaagcggcgagacggcgcgcaccgcgccgcagggcggggaggacgaatacggcctgatggcgctgctttttgaggcgctgtgcagccatacgggcaaaacgccgcgctggggcatgctgaccggcatccacccgatcaagctcctgcgccagcttgcggcgcgcttcggcgaaacggaggccgagcggctgtttagggagaaatatttcgtctccgccgagaaaactgccctcgcggtgcgcacgctccgcgaggaggcgcccgttacggcggacgtcggggagaacgactgcgcgctgtacatctcggtgccgttttgcccgacgcgctgcgcgtactgctcgttcgtttcgcagagcgtggaaaagacgaaaaagcagatcccgcagtaccacgcgctgctcctcgaggaaatccgggccacggcggactgcgtccgcacgcttgggcttcgtctgcgcgcggtgtacgtcggcggcggcacaccgaccaccttctcggcggagcagctgcgtgcgatgatcgaaacggtgcgcgccgcattcgacctttcggcctgcacggaattcacggtggaggccggacggccggatacgatcgaccgcgaaaagctggaggcgctctttcagggcggtgtcacgcgcatcagcatcaacccgcagaccttgcaggacagcgtgctcgagaacatcggccgacgccacacggcgcagcagacggtcgaggcgtttcggcttgcgcgcgcggtcggcttcacgaacatcaacatggatctcatcgtcggcctgccgggcgacacctacgagagcttctgctatacgattgagaaggtgctcgcgctcgacccggaaaacgtgaccgtgcacgcgctggcgctcaagcgttcctcgcgcatcacgcagagcggcgagatcaaccgggcgcacgctgacgcggcgctcgccgaccgcatgatggcctacgcggaggaacggctcacggcgcacggcctttcgccgtactacctctaccgccagagccgcatggcgggcaaccttgaaaacacgggctgggcgaagccgggcttcgtctgcgcctacaatattttcacgatggatgaaacggaaacggtgctcgcctgcggtgcgggcggcgtaacaaagctgaaggacccgtattcggaggatctcacgcgtatttttaactttaaatactcatatgagtatatcagccgctacggggagattttggaaagaaaggaaggcatcggcaggcagtatgagcaatttcgcaagcggatacgttaaatacatcaaccacctcgagcagatcaacgatgcggcgctgctgcgccccaaggcgatgatcgacgaggtggaggacgcctaccgcgagcacctgcgcaacatcgcgcgcaatatcgtgtcgcattacggcacggcgaaggtctgcatgctcgcggggccgtcctcaagcggaaagacgacgacggcgcacctgctgcgcgattacctcgcggcgctcgggctgaaggccgagatcgtctcgctcgacgatttttacctcggcgtcgagcagatgcccgtgctgccgagcggcgagcgcgattatgagacagtcaatgcgctcgatatcgagctcgtgcgcgcatgcatccgctctgtgatcgaccggggggcgtgcatgctgcccgcctatgattttacgacgagcgagcggcgcctcaacgcgcggaagctcgatctgcgcgggaacggttttgtcatcatggagggcatccacgcgctgaacccgatctttacgaaggatctgcccgagggcagcgcgatcaagctgtatgtcagcgtcaagcagcagatcaaggatgcgaacggcgaggtgatttcgccgatggatctgcggctgatccgccgcatcgcgcgcgacgtgcagttccgcaacacgtcggcggagcgcacgctctccatgtggccgaacgtcgttgcgggcgaggacaaatacatccgcccctaccgcatgtcggcggattacacggtcaactcgatccacatctacgagccgtgcgtgctgcgctcctcggtgatcccgctgttgcgccgcattcccgaggacagcccgcattaccgcaaggcgcgcgacctcgatgcgcgcctgatgcgcttcgagccggtggagcccggcctcgtgccggaaaactcgatgctgcgcgaattcctcggcccaaaagccgaaaagcgcgcggagtaagtaaattgtaaggaaatgttcaatctttctttacaaaccggcgcgtttgtcatttgcttttttgtgatttctgcgctataatgtagacagagccgcgggaaaacggcggcccgactatttgttataaaggagaataggattatgggtattttagacgatgttgtcatcaacgcaaaatccgcagcgcagaccgtcggcaagatggcgggccagtttgtggatatgtccaagctgagaatcaatctttcggagcttaacggcgagatcagccgccgctatcaggagctcggtcagttcatttacgaggcgaagaaggcaggttcggccgacgaggcggagcttgaggaaaaggtcgccggcatcgacgacctgtacacgcagcttacggcggtgtccgcacagctctcggcgctgcagaacaaggtcacctgcccgtgctgcggcaagcagatggagatggaagcgacgttttgcagccactgcggcatgaagctcggcgcagacgcggcgccggccgcgccggaagctcccgccgaagcgcctgaggccgccgcagaggagaccccggcggagaagccggaggaaaacgaaaacacggaggcgtaatttcgccgcaaggaaagtgaaaagcagcaggctgtgcctgccggacgtaaaacagggaggaaagaggcgcactctttcctcctctttcgcgggttaaatttggccgccgcagacgcggcgcgagacgaaacggagtttgttttatggttcggaaacagcctgcggcgcatgtgcgccagagctttctgcacggcgcgctgctgctcacggcgggcgtgctgctcgtcaaggtgatcggcgcgctgttcaagatcccgctttccaccgtgatcacggaggacggcatggggtatttcagcacagcgtacagcttttacaacgtgattttcagcatcgccacggcgggcttcccggtggcggtttcgcgcatggtttcggagaatgattcgcttggccgctggcgcgacgtacgccgcatcaagagcgtggcggcgccgatcttccttctgaccggcgccgtcggcacagcgctgatggtgctcggcgcgccgctctacacgcgggccgtcggcaatgcgggggcgctgcccgcgatgctcgccctcgcgccctcggtgctgctttgcagcctcgcggccgtgtaccgcggctattacgaggggctgcgcaacatgacgccgacgacggtctcgcaggtgatcgaggcgcttgcgaagctgctgttcggcctgagcggcgcgtatttcgtgatggcgcattgcagccgcgaattcgccgtatcgggcacggtgctcgggcatgccgtgcaggatgccgccggcgcgcagcggctgatctgcgcgttcggcgcggcggccgcgatcctcggcgtttcgctcggcgcggcgctgagccttttgtacctgcgcctgcgcgaccgccggggcgacggcatttcgcccgcgcagctcgcccgcgcgccgcagccgcagagccgccgcgcgctctccaaaagcctcgtgcagtcgtcgctgccgatcgccgtcggcgcggtcgcgatgagtgtttccggcctgatcgacgcttcgtttttgcagacgcgcatcgcgtatatcctcaggacagatccgtcgccgatgctttcgatgtacgcgggctgcatcccgcaggaaaacctcgccgcgcccgcgtcgatcccgaactacctcttcggctgctacaacatggcgctcacgctcttcatgctcgtgccgagtgtcacgcaggcgttcggcgtcagcgcgttgccgagcgtcacgcatgcctttgcgcgcggcgtgaaagcggaactgcgcaccgcgatggaaacggtgctgcgcgcgacgtgtatcttcgcgctgcccgccggcatcggcctctcggtgctcgcggggccgatcgcccggctggtctacggcgaccggccgagcacgccggtcatcgccggagcgctcggcatcatgggtgcggcggcgatttttgccgcggtcacgacgccgctcggcagcatgctgcaggcggtggggcacatggagctgccagtcattctcgttctgagcgggctcgccgtcaaggtcgtcttaaactacgtgctggccggtataccggcgctgaatattctcggcggcggcatcagcacgcttgtctgctacgttctggtgacggcggcggagatcgctgcgctggtgcgtatcaccggcatccgcttcgattttgtctccactgtttttaagccgctcttggcggcggcctgctgcggaacggcggctttttgggcgtggcggggaacggcggcgctcaccggcggctcccggctggacgccgcaccggccgtttttgccggcgcgctcgcatacgccgcggcgctccttttgctgcgtgtggtgcgcccgagggagctgcgccgcctgcgcggcagggcgcggtgaccggcgggcgcaccgctctggatttattttccaatttatccggcagaacgctgaaaacccgcagaaatcgcggctttatcgcaaaaaaaagaagaaaagcacttgaaaaaaacagaaagatagggtagaatatgaaagatgtttcgaaatttgcaggaaagacgcgctattcgatcgacgatcttctggaaatcctcgcgattctgcgctcgcccgagggctgcccatgggaccgcgagcaggaccacaagagcatccggcgcgattttttagaagaatgctacgaggcgatcgaggccatcgataccgataacacggcgcttttgcaggaggagctcggagacgttcttttgcaggtcgtgtttcacagcgagatcgagcgcgagctcggccattttgacttcgcggacgtcgtcagcggtatcgcggaaaaaatggtcgtgcgccacccgcacgtgttttctgatgtgcaggcggatacgacggacgcggtgctcaagaactgggaccagatcaagcgcgagacgaagcggcagaaatcgaaccgcgaggtgctcgagagcgtttccccggcgatgccggcgctgatgcgcgcgcagaaggtgcgcaagaaggcggcgaagatgggagaggccctgccggaagcagaggcgctcaaggcgcagattgcggccgctgtcatgcaggtgcaggcggaagacggcgcagagcagctcggccgcgcgcttttcgaccttacggcgctggcgcagcagctcggcgtggacgcggagcgcgcgctttttgacgcctgccgcgcgtatattgcgaatttcgaggcggaagaataaagcagctcgtatccggcgcgccggatcatgactggaataaataaaaattactggaggttattcattatgaataagtctgaactcgtaacatctgttgctgaagcggcatccttgtccaagaaggacgcggaaaatgcagttgccgctgtgatcaattccatcacgaacaccctgaccgagggtcagaaggttcagatcgctggcttcggcacctttgaggttcgcgaaagagcagagcgcattggccgcgacccgagaacgagcgaggagattgtgatcccggcttctaagacgccggcgttcaaggccggcaaggctctgaaggacgctgtcaacaagtaagctgcccgcgggtcaataaactggtgatggaacggatccgcatgggtccgttcttttgcatttttaaacgcgcaagcgcgcggaaaggcaggaatttacatgcgtttggataaatatctcaaggtttcgcggatcatcaagcgccgcacggtcgcgaacgaggcgtgcgatgcgggccgcgtgctcgtgaacggcaaggtcgcccgcgcgtcgtacgacgtcaaggcgggcgatgtgctggagctgcagctcggcgcccgcgcgatcaaggcgcgcgtcgtctcggtcaacgaatacgcaaagaaggatgaagccgcgctgatgtacgaggtcatcgaggagaagtgagctgcggcgcacagggaaaaacaatggattttgaagagctgatccgcattgcggaggaaaccctcaacccgcgcgcgctttcggacagcgcggaggcgggctccgttgctgcggcgctcgtaacggataaggggaacgtttaccgcggcgtgtgcattgatacgccgtgctcgatgggcttctgcgccgagcatgccgcgatcgccgcgatggtcacggcgggcgaaagccgcatcgagaggatcgtcgccgtctgcgcggataccgggatcgtcgcgccgtgcgggcgctgccgcgagtttatgtatcagatcgaccacagcaatctcgaaacgcaggtgcggctgaaaagcggcacggtgacgcttgcggcgctgctgccgcatatctggcaggcgtgatttccggcatatctgccgcctgcccgccatatgcttttatgagcgaaggaaaggctgaagccgcccgcggcttcggccctttttctttcatgcggcgcccggtgcggggcgcgcagaaataaaaaaggacgggtgatactgtgcagcagcaggcgataaatgccggaaagcatacgttggagatcgaaaaccgggcgcgtcttgtggcgaccggcgtagagcgggtggactttttcagcggcgagctgattacggcgcagacggccgggggccggatgcacatcaagggcgaggggctgtatatcgagaatctcaattcggagacgggcgagctgctcgtcaagggccgggtgatcgccctgtcgtacgacgacggcagaaagaccgcgggcgtgctgggcaggatcttcaaatgagcggcgtcgcaccggaggcaatcgttctcagcctgctgctcggcgtgctgctcggcctcgttttcgcggctgtggaagcgctgcgcgcgctgctctccctcggccgcatcgcgactgccgtgctcgacctgcttttcgcgttgctcgcggcggtttccaccttcattctggcactcgccgcagcaaagggaagtttgcgcttttttcaggcagcgtgcgagatcgtcgggtttttgtgcgtggatctgtcgctgacgcacgctgtgcgccggcttctgccgcgtcttgccgcaaggctgcggcgcctgtcgcagcggctttgcaggcggcggaaacaggtcggaaaaatttttctgcggaaaaaacatccatccaaagcagaaagtgagaaaaagcgcagattttttgggaataaagcgaaaaaaaacgaaaaaaagacttgaataacgcccaccggctattatataatggaaaaagcaagaatgacgcggccggtttgccggcatacggaaaggggcgtatcccatgcaggaagtgaaaacgaaaaagtataagggaagtctccttttgaaaatcgctgtgttcagctttgcgttttttatggtctcgatgctggtgagccagcagattttgatcggccagaaaaaggcggagctggcggagctcgagcaggcgctcgaggagcagcaggtggtgaacgacggcctgcgctacgacctcgacgccgaggacgcggacagcgacgaatatgcggaaaagaaggcgcgctacgagctcgattatgtcaagccgggcgagcgcgtgttttacaacgtcggcggcaacaactaaattatttttcaatcccggaggaaatgaagagggtatgcaggaaacaaagcttgaggttggagcaatttttgagggcaaggtaacgggtatcacgaaattcggcgcgttcgtcgatatcggcggcggaaaaaccggcatggtgcacatctccgaggtggcgccggtattcgtcaaggaaatccgcgattttgtgacggaggggcaggccgtgaaggtcaaggtcatcggcatcaacgatgacgggaagatcagcctctcgatgaagaaggccgatgaaaccgcacagcagcgcccgccgcgccgccgtgaggacagccggccgccgcgccagaaccgcgtgcgccgcgaatccgcgcccgtatcgcaggggccggcgcgcccgggcgactacgagtggcatgcccgggagaactccggctcgttcgaggacatgatgtcccgctttaagcagacgagcgacgagaagatttccgacctgaagcgggcggaaaacaagcgcgggggttactcgcgcaagggcccgagaggcggctgagtcaagcgaaagccatcagaaagcgttttcgggtggctttttgttacttttatcgtgcggcctgccgccgcaggtttacggcttgggcaggtcagggcgcctgctgtgccgctggggaggaggaaaacggatgaaaagggaaatgggctttggccggtgcggactcgcgtgcggcctgtgcacggagaatgcggactgcgcgggctgcacgaacggcggctgccccggtgcgcagacctgtgaaaaccgcctgtgctcgctcgaaaaggggcttgcgggctgctgggaatgcgcggagaccgactgtagaaaagggctgctgcaaaagatcaagccgcgcgttttctgccgatatatccggcatagcggcgccgaagcgctgctcgaccgcctcgcgcgaaatgaagcggccggcgtcgtctaccaccggagcggcgtggccggggattacgacgcgtttacggatgaggcggcgctgctgcgctttattcaaaacggaaggtgaacggctttgtggatgaattttaaaatttctgaatccatattgatttttttataggatgtgttatactataggtacagagaaacggcaagagtcggttcccttgaatatcgaaagcgctgtctttcagaaaggatgtgtttgttccgcaggcaatggaaagcacgtccttttgtgcttttcgcggaagaaacgggtggttgtatgaatatcacgatcgttggcagaaaggtgaacttgagagagaattttaaggaaatggtacagcgcaagctgacgaagtttgagcgtatttttgatgcggatgcagacgtgctcgtgaaggtgaccgtcgagaagaacgagcagaccgtggagatcacgatcaggcagcgcggcatgatctaccgcgcagaggccgtcgcccccgagatgaacgacgcgctggacgatgtggtctcggcgctcggcagacagatccgcaagaataaaacgcgcctcgagcgcgcaaagaaggtgcagcagttcgacctttccggcgaatacgaggaggagccggacgaggagatcgagatcgccaagcgcaagacgttcttcgtcaagacgatgacggtggaggaagcgatcttgcagatgaacctgctcggccacacgttcttcatgttccgtgacgatgcgagcggtgagatcaacgtggtgtataagcgaaacgacggcaaatacggcattctcgaaccggaaacctgaatcagaccataagttcccaattgcctttgaagcggcccccgaagatttttgcgggggccgttctattttctgtttttcccgcataggaatccaaagcgcgggtgtgcgcctgcacggcccgcgcattttttggatatggggtgatcgatgtgggaaaagagcgcaaaaaaacggacgtcacactgccggaatcggtgcccgaagggctgcttcaggtcagccgcgtccacccggaggaccgcgtcgcggcgctggcgggcaacccgaacgtcggcaagagcacggtgttcaatgcgttaaccggtctgcggcagcacacggggaattgggcgggaaagaccgtttcgaacgcgcagggttactgcacgttccgcgggcacggctatgtgctggtcgatctgccgggctgctactcgctgatggcccattccgctgaggaggaggccgcacgcgatttcctctgcttcggcggtgcggatgccgccgtcgtcgtgtgcgacgcgacgtgcctcgagcgcaatctgaatctcgtcctgcaaacgattgaattgcagccgcgcacggtcgtctgcgtcaatctgatggatgaggcgaagcgccgcggcatcgcggtcgatctcgaggagctgcacctgctgctcggcgtgccggttgttggggcgagcgcgcgcagccggcgggggctcgaccacctgatggcggcgcttgcccgcgtgatggagggggaagcgccggagccgaacagcgtcgtctacccggatgcggtggagacggcggtcgcgaagctcgtgccggttgtgcgcggggactgcccgccgcagatcccgccgcgctggctcgccctgcgcctgatcgacggcgatgattcgatccgcgcctcgatgcgggagcacctcggcattacgctcgccgaggaggcggcggtcgacgcggtgctcgaggggttcgaccgcgccgcgctctgcgaccagatcgtttcctcggttgtgcggcatgccgagcgggtcgcctctgtttcggtgcgcagcctcgaggagaaatacagccgccgtgatcagcggctcgaccgcattttaacgggaaagctgaccggtttcccgatcatgctcttgatgctgctcgtcatcttttggctgacgatttccggcgcaaactacccctctgcgctgctttccgaggggctgtttgcgttcggcgaggtgctgcgcggtttctgcacggcgctcgtgctgcccggctggctgatcagcctgctgatcgacggcgcgtacaaaacgctcgcgtgggtggtctccgtgatgctgccgccgatggcgatcttcttcccgctgttcacgcttttagaggatctcggctatctgcctcgcgtcgccttcaatctcgacaatgcgtttcgcaaatgctcggcctgcggcaagcaggcgctgacgatgtgcatgggcttcggctgcaacgccgcgggcgtcgtcggggcgcgaatcatcgattcgccgcgcgagcggctgctcgccatcatcacgaacagctttgttccttgcaacggaagatttcccttgcttatttcggtcatttctatgttcttcgtggcggcttccggcttcttcggttcggtgctttcgtcggcgctgcttgttctcgtgatcgtactcggtgtggggatgaccttccttgtctccaagctgctttcaaaaactgttttgaaaggcgtgccgtcgtcgttcacgctggagctgccgccgtaccgccggccgcagataggcaaggtgattgtgcgctcggtgctggaccgtacgctgttcgtgctcggccgcgcggcggcggtcgcgctgcccgccggcgtcgtcatctgggttatggcgaacgtgacggtgggggagcagacggtgctgatgcactgcgccggcttccttgacccatttgcggggctgatggggcttgacggcgtgattctgcttgcgttcatcctcggtctgcccgcgaacgaaatcgttgtgccgatcattttgatggcgtatctcgcgcagggctcgctgactgagatggcggactacgcctcgctgcacaccttgcttgtcgcaaacggctggacgtgggtgacggcgctgtgcacgatgctgttctccatgttccactggccgtgctcgacgacactgatgacgatcaaaaaggagacgcagagcctcaaatggaccgccgcgtcgtttttgatcccgacgctgtgcggcgtcgcgctctgcatggcggtcaatgctgtcgccgcgctgttcggcgcgtgacgcttttttcgatcggcgatcctataaaaacagatgcgggcctatcgcgcccgcatctgttttcgcgtgtatttgagagttaccgccgccgcaggattgtgatggcggtataatgcagaacggaaaacgccttcggcgcggttttcgccggcagctttttgtgcgcgcgctcaaaatcagcggtctccgcttcggaaagcgaagcgccggtgcccgtgtcgatgtcgagacgcgcgccgtccttcggcgcacaggcccgcgtcgagcaggaggcggaaaaattccggcggataaatattccggcagcgggcgtagtccgcagaggtgcgtccccagtcgaaggcgcgctcgttgtcgatcgcgcggctttgcatctggcattcccacgtccctttgattttattggaggctcatgcgttcaaaaattcctcgaggctcgtgtaatcgacggcggcggtatcggcctgccgcaggaagccgagcagcttttcggcgaggatgcgcacgccgccctctgcgttgctttcgaggttcagcggcagaatcgggtcgtgcacgctcatgcgcagcaggaaccagccgtcgcccgcgcccgccgggaacgaaatgcggatgccctcgcggttgtcgggcgcgacggcccagccggcttcgttggcgtaggcggcgagatcggcgatcagcttctcgccgacagggcgaaagtccgccgcggtgatcgggaagcgaagttccttttcctccttggcctcctgcaaatcggcgatcaggctctcgagcgtcttgccctcgcggcggagctgcgcggccttgacgataatttttgtcacgagatacgcgccgtcgtctagaaaatggttctcgcgcagcgccgcgtggccgcttgtctcgattgcgagcgggcagttgacgccctcggcgttgaggcgcagcgcttcgttgataacgttcttgtacccgcgcttgaagcggtgatggcgcccgccgagcgtcgtttcaatgtaggttttaaggccgtcggaggtgatcgagtcggtaacgacggtgccgcccgggttgccctcgagcgcgatggccgaggcgatcgcaacgaggcggttgcggttgatctccgcgccgcggctgtccacggcgccgccgcggtccacgtcggtgtcgaagatcacgccgaggtcggcgccggcgcgcacggtcgccgcgcagacgctccgcatggcctcctcgttctcggggttcgggatgtggttcggaaagcgcccgtccggctcgaggaactggctgcccgtgatgtccgcgccgagcggctcgagcacctcggtcgcatagaagccgcccgcgccgtttccggcgtccacgacgatcttgaagccctctaagggatggtcgcggtccggcgcgttgacgccggccttgatcatctcgcgcagatttgcggcgtagcgcgtcatgtagtccgtcggcgtcacagcgccgcccgccgcctgcgcgggcgcctcgccggcttcggcgtatttaaggatctcggaaatatcggggctgtcgaggccgcccgccggcgtgaagaatttcaggccgttgcggaaaaacgggtggtggctcgcggtgatctgcacagcgcagtcgcagggcagctccagcgtcgccatgaacatcgacggcgtggaggcgaggccgcagtccagcacctgcacgccgcggggcgcaaaggcgcggcagagcgccgccgagatacggtccgccgagatgcgggaatcgtggccgacggcgattttcagaccggcagccggttttttcaggtgcttttcgcaccagacgagaaagccgcccgcgatgcgctcgacgacctcgtccgtcaggctgaccggcgcgccgccgccctcgctcgcaacgccgcggatatccgtgccgcttttcagggatttataggaaaacatgtggaaaacctccttcattgctctggccctattataatacaaatacggaaacttgaaaagccccgacgccgattttaccgaaaaacaccgcgcgcggcgttaagaaaacgggcggatatggaaaaaacggttggtggaatttgcgcccagaaagttttataatgggggcataaataaaaaggaggcggaaacgatgtattttggaaacagcctgtttcaggcgaggaaaaggagcggtctttcgcaggagggcgtggcggaaaagctcggtgtgagccggcagaccgtgtctaaatgggagacgggcgaaacggtgccggatatttaccaatcgaaaaagatggcgcggctgtacggcgtgtccctcgacgagctgatcgattttgacgcggacgtccgggagatacaggagaccatcgagaaaacgaaggccgaaacggaggaaaagattgactggacgagcgcatggggcaagaaatacccggtgctgctgcaataccgcggccaagtggcggcggagggttacgccagacagctctcagaaatgctcgacgcgctgaaacgggaatacgcgtacagcgagcaggacgccatgctcgtgctgaaggacatcctgtaccgcgtctggaagagccgcagggaaaagaaaagcgggtgaccccctgccgcgcaggcgggaaaaggcgggcggttctgcccgtttggcggcggggcgcaggtggaaaccgcttccgggcggcagggcgcaaagggtgctgcaggcgcgctttttatccgtccgcatacggcggaaaagcgcggaaatttctgcaaaacccacagaaaaccttgtcgaacacattttttgtttgtggcgttcgggcattgtgcatttgaaaacggtatggtagaataaggccatcataggatattatggagacttaaagcctccataatggtgtgaaatctcaaagtataaggagagatgaatgatgtctaaaatgatcgagctccacgacatcgatgttcccggctttctggctgttctggacaaatgcgtcggcaacgtctacctgatgacgcgggacggcgacaagctgaacctcagaagtaagctttgccagctggtcggtctgacaagactgattgaaggcggcaagatcgccgaagccttcgtaacatgcgataacgaggaagacgaatcgaagctgttccgcttcaatctgtataaagacgaaaccgatgtttaagctgtgaaccaaagaggctgctgcgaatcgcggcagcttttttgcatgcgcggcggatcataaaaagggggacttgaatggcagggaaagaatcggcgcggcgcacgcgcagggcgatatcggccgtgagcggactcatggcggttctcgcgctgctcgcgctttacttcttggagaccagaggggcggcagagccagcgcccacgcctgcgtccggcaaggcgctgcaggaaaaggcggcggtctattttctggatgtcgggcagggagacagcatcttgatccgcgcgggcgattacgcgatgctgatcgacgccggggtgcgcggcgcgggcgacgcgatcgaggcggatctcgaagcgctcggcgtagacgcactggacgccgtagtcgcgacgcacccgcacgccgaccatatcggcgcgatggatcagatcctcgaggactatgaagtcgggaccttttacatgccggtgctgccggatgaccagacgccgacgacggcgacctacgagcgcatgctcgacgttctgctcgaaaagcaggtgccggtggagcgcgtcacggccggcatggagatccccgcgccggcagacatgaaattcgaggtgctttcgccccgcacatccgatgcgtggaacgaggtaaacgattactccgccgtgctgcgcttcacctgcggggaggtttcgtttctgctgaccggcgatgcggaagtgccggcagaggcccttctggtcgaggaaaatgcgccgctttcggccgcggtgctcaaatgcgggcatcatggctccgcgtccgcctcctcgatgccgtttctgcgcgccgtgaatcctgagatcgccgtcatttcctgcggcgcggacaacggctacggtcacccgcacgatgagacgctcaaaaatctcgcggcgctcggctgcacggtgctgcgcaccgacacggatggaacggttgcagtcgtgacggacggcgagcgctacaccgcgcacacgtggagcgccgaggagggattgtcgccggccgcgtaaattcccgcattgcattgtgtggcggggcatgatataatcgtcttaaagaaaaatgcaaaggatggagaagcatgctgactgagagcaaaaaagcatttattgaatttatgatgtccgccgacgtgctgcgcttcggctcgtttgtgacgaaaagcggccgcaacacgccgtattttgtcaataccggcaactataaggccggcgagcagatcgcaaagctcggcaaattctacgcggcgcttgtcaaggaaaccgtcggcgaggatttcaccgcgatgttcggcccggcctacaagggcattccgctcgccacggcggccgcggcggcgctctacaacgaatacggcatctcgaaaccgtactttttcaaccgcaaggaggaaaaggaccacggcgagggcggcagccttgtcggctacaagccgacggacggcgataagctcatcattatcgaagacgtgatcacggcgggcacggcggtgcgcgagacgatgcccatcctctatggctgcggcgacgtgcgcgtggacgacatgttcatctcggtgaaccgctgcgaggtcggcaagatccccggcaagaccgcgatcatggaggtcaaggaggagtacggcctcaacgtgcatgcgatcgtcacggtcgaggacatccacgactacctcgtgcagtccggcgaatacgatgaaattctgccggccatggaaaaatacatgcgggattactgcatcctgtaaggaaagaaaggaccgggaaagcgcgccgcttttccggtccctctgcttcccgataggccgcgccgtgcgggagaaagccccgaaaggtgtgcggcaccgaaattctgcgggctgtgacggtgcggtgaggcccttcgggcacgcggttttgttatagaaaggacggagcaaatgaaaacattggtcgcgtatttttcacgcagcggagaaaattatgtaaacggagagatcgtggagctttcggtcggcaacacggcgctggcggcgaaggagatcgccgcgcagacgggcggcgacctgtatgagatccgccccctgaacccgtattccgagaattaccgcgcctgcggcaaggcggcctttgccgagctgaaggcgaacgcgcgcccggcgctggctgacccgctcccggagctttcggcatacgatacggtctgcctcgggtacccaaactggtgcggcacgatgccgatggcggtgtggaccttcctcgagagcggcgattttgccggcaagcggattctgccattctgcacgcacgagggcagcggtatgggcagcagcgaagccgacctgcgcgggctgtgccccggtgccgtactggggcgagggctcgcacttcgcggcgccgcggccgggagcgcgcaggtggaaatccgggaatggctggaggcggaggctgggcacgaggtgaaataggggagcctgctccgcgggcagccgcagacctccgtgctgtgcggatggcggttctcgaggggcacggtgcggcaggcggcttctcaggcccgtgtgacgtgccggcaggcagcggccgcgttctgtgagatctggggctgcggcgtgtgcggcgggcctgtggggcgttcgccgcgccggtctgcggctgtttgaaataaaacgaaaatctccccgcaggaaagcgcgtgcagcgctcctgcggggaggctatattttgtacgggacaacaaacgatccgttcatcttgcctgcggtgcatccggccgtcaacctgcgcgcaggcggcggaccggagaatcagacgtcgcggcgctttttttcggagccgtgcaggcggcggaacaggtcggaggcgaagaagcggtccgcgtgcttttccgcgatgtgctccatgaaatggttcgaaagcaccataaagacgatcagcacgagcagcagcgggatcagtacaaaaagcatggcggcggtcagcggtacgagcgagaaaatatccatgaaaaggatgtagccgaggatgaaagccagcatcatcgtgccgaacagcgcgccgcgcagggcattgaacggcacgcagagcttgaacatcagcataaagccgaccgtgaacgcgacgagcacggagagcgtggagacctgctcctgcgtgaggccgagctgctgctggaacaggcagaggaacagaacgccgaggatcatcgtcagcgccgaggggaaggattttttgagcacgttcgtcaggaaattgccgcgtatgcggtcgctgttcggctcaagcgccagaatgaacgacggcgcgccgatcgtcagcgcgctgacaaaggtgaggtggatcggctcaaagggataggaggcgggcaggaagataaagagcacgccgagaatgatcgagtaaattgtcttttgcaggaacagggaggcggagcgctggaggttgttgatcgaccgccggccctccttgacgacctgcggcatcgaggcgaagttggagtcgagcagcacgagatttgaaactgtgcgcgcggcgtcgctgccggaggccatcgcgatgctgcagtcggcctccttgagcgcgagcacgtcgttcacgccgtcgccggtcatcgcgaccgtgtggccgttcgccttgagcgctttgacaaactgcagcttctgctgcggggtgacgcggccaaacaccgtgtgccgctcgatcgccgcgctgatgtccgcctcggtttgcagcgttgtggcgtcacagtaattttcggcgtccgccagaccggccttctgcgcgatattcgagacggtcacggcattgtcgcccgaaataaccttcagcgtcacgccctgctcggcaaagtagcggagcgtctgcggcgcctcggcgcggatcttatcgctgatggcgatcaggccaaccggccgcacgtcggcgggcagggatttatcctcggcgaatacgccgtccgcccgggcgagcagcagaacgcgctcgccgcgcgcggcatacgcttcggtctgtgcgcggagcgcatcgaagcgctcgtgcaggataaattcgccggcgcccatcacataggtgccgcgcccctcaaaaaccgcgccgctccacttgcgcgccgaggaaaacgggacgaccgcgcccgcgcgccagagcgtttcgccggaaaactgcgcctttacggcgttgtaggtcgggttgtcgtcggaaagcgcgccgacgagcgcggtcagcgcctccgccatttccgcttcggtacagccctcgagcgggatgatctcatcgacctgcatcgtgccctcggtgatcgtgccggtcttatcgaggcagaggacatcgacgcgcgcgagcgattcggtgcagtagaggtcctgtacgagcgtcttgtatttcgaaagccggatcacgctgacggcgaacacgacgcttgtgagcagaatcagcccctccggaatcatgccgatcattgcggcgaccgagctgacgaccgcgtccttgaaggtgtcgtgcagaatgaaaaactgcttgccgaagagcagaaggccgatcgggatcagcgcgaagccgatcgtcttgacgatgaagttcagcgcgtgcaggatctcggaatgcgagtgcttgatgtacttcgcgtcgtttgcgatgcggttcgcatagctgtcgcggccgacgtgctccgcctgcgcgaggcagcttccggagacgatgaagctgcccgaaagcagcttgtccccggcgtgcttgagcaccgggtcgctttcgccggtgatcagcgattcgttgacctccacctcgccctgccgcacaacagcgtcggcgcagatctgctggccattcgagagctgcatcacgtcgtcgagcacgatctcatgcacggcgatgtggtgcagcgccccgtcgcgcagcacagtgaccttcggcgcggagatcagggagagcttgtcgatcgtccgcttggcgcggatcccctgaaaggagccgatcgcggcgtttgaaaaaatcacgccgagaaacagcaggtttttgaacgagccgaccagcagcacaaagaaggccagcacaaagtttaaaatgttaaaaaaagtaaaggtgttttcaagaataatctgcttttctgttttggttttgatgccctcgtccgcgttgctgaggcccatttccatgcgctttcgcaccgcctctgccgaaagacccgttttcaggtccgtacagggccgtgcgttttccgtcttttcagtttccatacccgattttccctttcccaaatagtcgttctttaaaaggatacacgaatacaggggcgattgcaaggcatcagaaatgaattttctcttacaatttgccgtgcacgggcgcagaaaggcggaaaatatttaataaaaactgcacgggattttggacaaaaagccggtgctcgtgcggacgtatgcccaaaagccgcggacttttttgacaaatctcccggaagcacggcaaaaatgcagggaaatctgtgggaaacggcagattctgcgccgcggcggtgcggaaaatgaagatttgactttgccgccgcctcgccttatactgataatacagaaaacagaagcaaaaaaccgtgtatatatcagtaaggagagaaaaatcatggcagttaagatggaaaaaaaatatgtcctcacgaaccgcagaagcggcaagatgctggcggtgaacggcgctgcggtcgttcagatgaccgaggacggcagcgatatgcagatctggcgcgctgtgcccgccgagggcacagcggtgcagctcgtcaataaggcaaccggttttgcgctcaccgttcccggcgaggcggagaatggcacggtgctcaccgctgcggcgccgcagggcagcgccgaccagctctggaagctgacgaccacgacgcgtggcttccgcaagctcatgcacgcggcttccggcaaggtggttgacatcaaggatatcagcgattccgattacgcgccggcacagctctgggagtttgtcaagggcgagaatcaggactgggtcgtcaccgaggtcgaaaaggaagcgaaggcgccggtcaagcgcgccgtgaaggaggtcaaggccgagaagcccgcaaaggcgccggccaaggccgcgaaatccgttaagacggcgaaaaaagcgaaataagctgttaaggggcctgcggcatgtgccgcgggcttttttcttgcccgcggcttttgcaaatacggtatatggtatcgcccggcgcatattcctgtaaaaaaagactgtaaaaacgtagttttgactgtgttcttttggagaactttcctgtataatagaagaagctccggtttcggagaattttaaaacagaaagtagatggggtcatggagaaagtattggtcatctgcgacgacctctggcacccggccgaggtcatcgagaaggggcttgccgcaagggcggacggccgcttcagcttcgacatcgtcaaagccgcgaaggatattctgacgccggcgcgcatcgcaaagtaccgcctgatcgtctgctgcaagagcaacagcgtgatcgcggcgaacccggcgccgtggttcgagccgggcgtgacggaggtcgggcccgccgagttcgaggaatttatccgcgcgggcggcggcttcctcgcggtgcattcgggtctcgcctataccgaggagcgctgtgcggagtacgtgcgtctggccggcgcggccttccgcgggcacccgccgcgctgcaccgtgcatttacgggcggcggcgcaggatcaccccatcctcgacggcgtgccggattttgtgatccgcgacgagcattacgcgatggaaatgacctgcgaggatgcggaggtctttctcgagagccgctccgaaaatggcgggatccagcctgcgggctacacgcgcgagatcggctggggacgtctctgcgcgctgacgcccggccacacgctggacgtatgggaggacgagcggttccagcggctgttcacgaacgccgccgaatggtgcatgaaggagcggtgaggcagatggagaggaaaactgtatggatcaccggcgcggaccgcggcgtgggcttctcgctctgcgagaaattcctcgagggcggctggcacgtgttcgccgggcagttcatgcccgaatggccggcgctcgatgcgctgcgggaaaaataccccgatgcgctggagattctgccgctggacgtcgggtgtgatgcatcggtgcgggccgccgctgaggcgaccgcggcgcgctgcgaccacatcgacctgcttgtgagctgcgccggtatttccggcggcgacgacccggagaaaacccgcgcgatttataacgtgaatgtggccggcgccgtgcgcatggttgaggcctttctgccgctgatgcaggccggcatgaggcggctcgcgttcgtctcgagcgaagcgggcagcgtgtcggtggcgcaccgggacggcggattcgcctacaccacctcgaaaacggcgctcaacatgctggtgcggtgcatgttccgcacgctttaccccatgggatacacgttccgcctgtaccacccgggctgggtgcgctcgtacatgagcgggaagaaatcgacggccggcaatttcgagccggaggaaaccgcggcggtcgcatactgccagtttacggccgaccgcgaggctgaggacgtgctcgtcatgaccgacgtcagcgacgagatgtggccgtattgacagggggggaagcgcgatgaacaaaattgtacttttgatggagaccgggcgccccgcggtccgcgaagcggcatcttggtttgcggcgcacggtgacaaggtttacctcggcgttccagccgtgccgcagttgcgcgatgaaaatgcggaataccttgtgttcgacccgctcgtgccggaaagcctcgcggccgcggtgaaaaccgtagaggcggcggacggcaggctggacatttttgtggccggcgcggcggctcacccgcaggatggggagatcggcgccgggcacgacagcggcgtgctggtggaggcgatgatgcggaacgtctatggaaaccgcgcggcggcggaggcgtttctcccgctgctgcgccgcggcatgaagcgcgctgcggcgattacggagatggaatcgagcaacagctggagcaccggcagggcggatctcgcctaccacgcgtcgctcgcgggcctcaatatgatggggaagattctcttcaaccgcctgcgccccgagggctttacattccgctggtactgcgatgacggcgcgccgggcggcatgtgcgcggcggaatacatcgtttccggtttgtgctacgacgagaaggagccgtacatccactccgacgaaaaccggctcgttctgcgcgacgcctatctgcgcgagatctcgtggtaaggccggggcggctccgcatctaaaatgggaagagcctccggcgcattcggtgcgtcaggggctcttttcagtgttttcggcaattttggcgagtgcaatcaggtgcaggccgaacaagaacagcggcgcgccgagcaggccggcggcgcatgcggcgagcgcggcgatccatgcggcggtgagcatcgcgtcgccggcgacgaagaggacagccccgaagcgcaggagtgaaacgagtgccagcacgagcagaacgaggaggccgatgaggagcgcgcacagggcgtattttccagcccgatagagccgttcgccgcagcgcagcagccgttttgcatcccacatggttgtccctcctttgtaccttttggaaaagtataacacatttgtgttcataagacaacatatgtattcataattcggccgcttttcccctaaactactaggggaaggggtggtcaatatgctggacgcacaggtggtcggcgctgtcatacagcgttttcgggaacagaagggtgtttcacaggaggttctgagcgggctggcggacatcggccgcacgcacctgagcgccattgagcgcggcgcgcgcaagccgacgctcgagaccttctaccgcatcggcgaggcgctggacatccagcccagcgtgcttttggcggcgatcgaggaggagctcgccgcacggaagccgtaacggcgcggatttttacaaagaacagaaagaggatgtgcacgaaaaatgcgagagatcaggaggctgcgggccgtcgcagtgattcaaaggggcaaaggaggtgatgcggagcaaaaataaaaggagcgaaaaataatatgaaaataattccaaacccgaatgtcgtgtttccgaacgattacggcacgacatgcttcataaaaaatgttattactgcacccaacattctcgtgggcgactacacgtattacgatgacccggaggatccggctggctttgaagagaacaacgtgctttttaattacccggaattcggcgaccggctggtgatcggcaaattctgcgcgatcgcctccggcgtgaaatttatcatgggcgcggcgaaccaccgtctgagcagcgtgacgacgtatccctttgcggtgttcggcggggcatgggcggaaaacgcaccgccgcacctcagccagcttccgttcaagggggatatcgtcgtcggcagcgacgtgtggatcggccgggagagcgtcatcctgccgggcgtgcatatcggcgacggcgcggttattgcggcgtactcggtcgtcgcgaaggacgtgccgccctacacggtgttcggcggcaacccggcgcgcctgcttaaaaggcggttcagcgcggcgctgaccgaaacgctgctgcggctcaaatggtgggatctggagccggagacgctggccgggctgatcccggtgctgtgcagcccggacctcgaggcggcggaggagacgcttcgcggtatgctgcgcgaaaaataagaacagcctcggcctgtaattttttgcgggccgaggctgttctttcgtgcgcggaggcggtgcagaaattttcagatgtgcggttcggctgcggcgtgcgccggcgcggcgcaggatacagagcctccggcggcagcggctggatggcctgccgcctgtgccggacgtttgcgcagttccgccttcgaaagaaatggacgtgctctcgggcgcacccggcttgcagcggcaaatattcggcgcgcgcagtccaatggaaaggaacggcgctttttcctgtttgtggaattcaaatccccatattcaatttttatatcttataattcgatgaattgagataaataaatcctgcaattctccgaaaaataaactgtaaagatttatagttattaaagccgcaaaggagatgaacgcatggattacgaaaaatggtttgcggagcggctgacagcactccgcatggaaaagggcgtttcggcgcgcgacatgagcctttcgctcggacaaagcgagagctacatcaacaaaatcgaaaacagacgcacattgccgtccttgagcggatttttctacatttgtgcgtattttgggatcacgccgcaggcgtttttcaacacggaggtcgcgtctccggggaaaacggatgcgcttgtgcgcgagatcggccggctgccgccggcgcaggccgagcatattttgcagatcgtgcgcgatctgaatgaaaagggaaagtgaaatgcgcccccgcagcttccgtgcggaagccgtggagcgcatttatttttcccgtgtgccggaggccgcggcgcggaaggccttgggcgtcatcccgaaggcgcggtgaaacatgcgcgtgaagtatccgccgctttcaaagccgacggacagcgcgacggcggtcacggtatccttggttttcagcaggagcgctttgccccgggccagccggtaatcggtgagaaagcgcaccggcgaggtctgtatgccggcgtggaagcagcgcagcgcctcgcttttgctcacgccggcggcgcctgcgatgtcggcgagcgcgatccgctcggggtaatgcgtctcgataaaccgtatcatgctttgcaggcgggattgcagcaccgcgttttccgcggagcgcgtctcgcaaaagcgctccccggcatgcgcggcgagcgccgaccacagcgcgcagctctccgccttgaggtcgagcgtgcgcagcgggctgtcggactgcgcagtctcgaagatccggcgcagccggtgcagcaccgcgtctccggcgtcggttccgcgggtcagggggataaaacggcagccggcattcagcacgggcaggatatgctgccggaaaacgagggaatcccgctcggcgaggaactccggcgcaaaaaggatattcggcatccgcccctgcgcggtcgattcaaaccggtggatggcgccgctgttgatgaacagcccgctgccgatttccatgcgcagccgctcggcgccgatcaggcagtcgatcgggccggcgtcgaccgcgacgaattcgaactccctgtgccaatgccacgcgatggactgtccgctgaacttattgaaatcgtcgtaataatactcgaacgggaattccggcgtgccgtgcgcgcgcagctcccgcagggtttcgtctgtgcggatttctgtgatctgcatggtgtgtcacctcattctggcgatattgtaccataaaagagcgatattcttcaagcctttcggggctgtcctgtgctatactctcaaaaaatgcttttttctcaagggggaatttcagatgcacaggtataagggaacgctccgtgcctgcttcacggggtacatcgtgcaggcggtgatcggcaatttcgcgccgctgctttttttgacgtttcaaagggaatatgcgatcccgctttcgcagatcacgctgctgatcaccgtgaatttcgccgtgcagcttttggtcgacctgctttccgccgggttcgtcgataagctcgggtaccgcgtttccatcgtgctggcgcacgcgttcgcggccgccggcctgatcctgctgacggtgctgcccggcgtgctgcaaagcccgtttgccggcctgatggccgccgttgtcatctatgcggtcggcggcgggctgatcgaggtgctgatcagcccgatggttgaggcgacgccctccgaaaacaaggagaagatgatgagcctcctgcactccttctactgctgggggcaggtgggcgtcgtgctgctttccacgctgttttttcagcttttcggcacggggagctggcgggttctcgcgctgatctgggcggccctgccggccgtgaacgccgtggttttcctgcgcgtgccgatcgcctccttagaggacgaggggcggggcgggcttgcgctgcgcagcctgctcaccaaaaagatcttttgggtgctgctgctcctgatgctctgcgccggtgcgagcgagcaggcggtgagccagtgggcctccacctttgcggaaaatgcgctcggcatcggcaaaacggcgggggatctcgccggcccgatggcatttgcgctgctgatgggcatttcccgcgcgattttcgggaagtacggggataggctgaatctggataaattcatgctgttcagcacgctgctctgcatcgcctcctacctctgcatcgcactggtgccggtgccggcgatcagcctgatcggctgcgcgctctgcggcctttccgtcggtatcctgtggccgggcacgttcagcaaggcgtcctccggcctgccggcaggcggcacggctatgttcgcgctgctggcgcttgcgggcgatttgggatgcacagccggcccgaccgtggcgggcatcgtctcgagccggttcggggataacctgcgcgccggaacgctggcggccatcgtgttcccgcttctgctgctcacgggccttttgctctacaggcgcctgcggcctgccggcaaaagagcggcggacgcggcgcaagcgtgaccaaaaataagccgaaaggcccggcctgccccaaaagggcggaccgggccgcttgcatgcgcttggattttgaaggcgctacgcggtgacttcctttgtgatgttccgcagccatttcttctggcggtagcggaagtagacgacgggcattttcgcaaactcgtcgcagctcagaatcagataaacccacagcggcggcaggttccacacaaacgccgcgatgaagccgagcggcacgaaaaccgcccacatcgcgatgatgtcgcagacaaagccgaagcgcgaatcgccgcccgcgcggaaaacgccgcaggtgaagcaagtgttcatcgtggggccgacgacatacacggcgctgatccacaccatgacctgtaagtattccttcgcctgctcggtgagctgaagcatcgagacgaggatcgggtggcagccgaggatcacaaagctgccgagtacggaggtcaaaaaggtcagccagagcaggcgctttgcgtcgcgctccgcgcgggccatgtccccgccgccgatcgtcttgccgaggatgatcgccgtgccgttcgcgatgccgaagccgagcacggaggcgaggttgcgcatcgtcgaaacgatcgagttcgccgccacgatgtcctcgccgaggtggcccatgatgaccgaatacattgagaacgcgaggccccacacaaattcgttgccgatggcgggcagcgagtagcggatgaaatcgcgccagagcacgcggctgtgcagcgtgaaaagccgcgggcgcaggcgcagcttcttgaagcgctcgcccacgacgatgcacagcacaaactctacggcgcgcgcgatcaccgtcgccagcgcgacgcccgtgatgccgagcggcgggatgccggggatccagccgaagatgaacgttgcgttcagaacgatgttgagcacgagcgcgaccgagttgagaatggtgctgatacgcacctgctcgatgctcttcatcgcgctcaggtacggctgcgagagcgagagaaagaggtaggagaagccgacgacgcgcagatactcggcgccggacgcgatcatgttcgcatcgtccgtgtaaatgcgcatcagggcctccgggaaaaagaccgcgcccgcaaaaaagaccgtgccgacgagaaccgagagcttcaggccgatcgcgaggatcttttcaatggcggggaggtcgcccttgccccaatactgtgcggcgaggatcgtgatgccggccgcaaggccgccgtagatcatgttgagcagaaactggatctgcccggcgagcgagcttgccgcgagcgccgtctggctcacgtagccgagcatcagcgtgtcggccacgccgacggcggcggtgatcaactgctggacggcaatcggcacgacgatcgcgaaaaaggaacggtagaattgcttttttgcagtatcctgcatgatgagaaaacagccctttccaaaagaaaatcagagtattctgattgtacgataattttgcgcgcctgtctaccgcaattttacagatttctgccggaatttgtgcgtttctgcggtttttcccgctatgcctgcgcggcatgcgtgccgataagaaaaaagtattttacagccccgccgtttttgcgtataattgaaaggaactcgaagcgcagagcctgcgctcaaattgacggtaaggaaagtggttttgaagatggggaaaatctatgagggcctgaagctcgacgcggagcgcgcgctgtacggcgaacgggacgcggtgatccgccggtgtgtgttcgacggaccggccgacggcgaatccgccctaaaggaatgcggcgggatcacggcggaggactgcgattttcatttgcggtacccgttctggcacgtggcggacggccttgtgcagaattgtcgcatgacggagacctgccgcgccgcgctctggtacgaccggggcatgcacgtcgaaaacagccgcctcggcggcatcaaggcgctgcgcgagtgcgacgataccgtgctcagcggctgcgaaatcgaatcgacggaattcggctggttctgccgggggcttaaaatcaccgattgcacgctcaaatcggagtatccgttcatgcagacgcacggcatggagattgaaaacctgcgcatgcagggcaagtattcgttccagtacgtggagaacgtcacgatccgcgattccgtgctcgacacgaaggatgcgttctggcacgggaaaaacatcacggtggaggacagcgtcgtcaaaggcgagtacctcgcgtggtacagcgaaaacctgcgcctcgtgcgctgcaaaatcatcggcacgcagccgttctgctacgcgaagaatctcgtgctcgaggactgcgagatgatcgactgcgacctcgcgttcgagaacacgaccgtggaggcggacgtgcgcggggagatcctgagcgtgaagaacccggcgggcggacacatcacggcggacagcatcggcgagatcctgctcgacgagcaccgctggccgggcgccgcgtgcgcgatcaccgagcgtatcggcaaaagggcgtgagccgggcgcaccgaaaaacacggcgcaggagaaagagggcggcctccgaaaaaaatggaggccgccctctttctgtgcgtatgccgcctttcgcgcaggcggtcttggcgggggcgtgcggcggtcacggccgcatgtgcacgtccatctgcgggaacgggatcacaatgccgttttcgtcgaacgcctttttcacgccctcgttgacgtcgaagaacacgtcccagtaatcctccggcgcgcaccatgcgcggagctgaaagtcgagcgtgctcgcgctctgcgccttgaggcgcgcctcgggcgccgggtcgcggagcaccttttcgtgggcaagcgccacgccgagaatcgtttcctttacccggtcgaggtcggagtcgtatgcggcggaaaagacgatgtccacgcgccgcgtcgtttccgcactgtagtcggtgatcgccgtgttggtcagcgtgccgttgggcacggtcacgcgcttgttgtccggcgtgacgatcacggtgtacagcacgttgacctccttgaccgttccggcgatctccgccgtctcgatgtaatccccgacgcggaacgggtggaacagcaggatcatcacgccgccggcaaggtttgaaaccgcgccctgaaaagcgagcgcgaccgcgacgccgcccgaggtgaacagcgcgagaaacgaggtcgtctccacaccgagcacgccgagcagaattagaaacagcaggatgtacagcgcgatcttagaggcgctcaccgtgaaggtggcgaggccggggtccatatgcccgtagagcttcgagcgcttgaaccgctttaagaaaaatttgatgagccgggtgccgacaaaaaggagagccagcgcgaaaacgacgcgcaccgcgaggcgggcggcctgctcgccgagcgattcaaaccacctttgcagctcgcttgctgtgggcagctcctcgagcgtcgccgcgtctgcggtaagtgtaaaaaatcttgtcatagcggcctccgttatttaccgatgcgctcggtgtcgatgatgatgttcacgggcccgtcgttctgcacgtccacgtgcatgtgcgcgccgaattcgccggtgcacaccttgccgaccggctgttttgcaacctgcgagacaaagtagtcgtagaggtgcttggccgtatcgggcggcgccgagcggctgaaatccggccggcggccgtgcttcatgtcggcgctcagcgtgatgttcgagacgatcagcgcgtcgccgccgatgtcgatcagcgagcggttcatcttgccgttatcgtccttgaagatgcgcagctcgcagaccttctgcgcgagaaaatcggcctgctgctcggtatcgcccgccatggcgcacatgaaaacgacgataccctcgccggtttcacgcgtttcgtttccgtcgattgtgatgaaagcgccgttgatgcgctggataattgcccgcatgggatcagccttcctttaccgtgtcgatatgcttcgattatagcatggattctctcttgcttcaagcgcttttgtttgctataataacggcataggaattacgggcggacggccggaagcggcgtctggatgcagaaaggaaaagggttatgcggatccacatacaaaatgaaaatgtttcggctgaaatcaacacgctcggcgctgagctcgtctcgtttaagggcagcgacggcttcgagcacatctggcagggagacccgaaatactggggcggccaagcgccggttctgttcccgattgtcggcgcgctgcgcggcggccgcacgcgcatcaagggcgaatggtttgaaatgaaccgccacggctttgtgcgccggcgcgagttcacggtggccgaaaagcgcggggacgccgtctcgctcgtcgtcgagggcgatgcggagtcgaaaaagcagtacccctacgacttccgcttcacggtgacctacacgctgacgggcagcagcatcacgacggaatttaaggtggaaaacacgggcggcgagccgctgccgttctgtgtgggcggccacccgggcttcaacctgccggttgccgagggcgaggtctttgaggattacgatattgtatttgaaaaaccggagacgcagaagtgccccgaaatcgacctcaaggagtgcctgatcgatttcgacaaggtcacctatacgctcgacggcgagagcgtcatcccgctgcagcacagcctgttctaccgcgacgcgctcgtgttcagcgatctcgaatcgacctgcgtttcgctcaagagccgcaagagcggccgcggcgtgatgatggagttctccgatttcccgatgctcggcatttggtcggcggcgaacgacggcccgtatgtcgcgctggagccgtggaccggctgtgcgacggcggtcagcgagagcgacgagttcctcgagaagcgcggcatgcgcctcttggagccgggcgccgaggcgacatacgcatttactgtgttcagcctctgaggcggccccatggcggagacgacgattaccaacatggtcatgctgacaaatccggaaacgggcgaggtgcttgtgatcgaccgcgtgaagaagtacccgggcatcgcgtttcccggcggccatgcggagaagggcgaaagcatctacgacagcgccgtgcgcgaggtgctcgaggagaccggctacacggcgcaggcgcttgagccctgcggcttcatctactgggataatgcggacggcagccggtatttcacgtatttctataagacgagcaccttttccggcacgctgagcggcggcacggaggaggggcgcgtgttctgggtgcggcccgaaaggctgccggaaatgcgtctcgcgccgaatatggacaaatacatgaggatgttttcggaaaagcacagcgagtgctactgcttggagtgcgccggcggttacgaggtgacctaccggtaaaattagttttcttttcagcttggctttgcccctgcggttttctgtaggatgtgtccatgcacggtggacatgtcttgcacggaaagccgcggggcttttttatgcttttttgcagtttttacgggtgaagtttgtaaattctcacgggaagaaaactgcgaaaaaggcttccattttgcaacaatcccgctataatatacagaagcaaaacaacgcggctctgcgggccgcgtgtgcggcaaaaccgagtttgtattggaaaggaaggtccttacacaatgtttcagatgaaatgggtttggaaaaacctggagggctgccgaaagcgatatgttttcgcgctgtgttccaccgttctcatctctatgatggcgctcgtcaattccgttttgacggcgcagatcatggacaccgtttttacgcccgtgcagcagggcggcagcgtcacgccggcgctttggagccgcctcgtgttcctcgtctcgctgctgatcggcttcacgctcttccgcacctcgttccactatctgtcgattattacatacgaaacgtgctcgcagaagctgcttttcaagctgcgccgtgagctttatgccaacatgcaggcgcaggacagcagtttcttctcgaagaaccgcaccggcgacctgatgacgcgcctgaccggtgacctcgacatggtgcgccacacggtctgctacgtcatccgcatgctgatcgactgcgtcgtgctgttcctgacgacggcggtcacgttccttgcggtcgactggctgtttgcgctgtcgatgctcgccgtcacgccggtcatcttcctgctgacgaaggccttcgcgaagcgcgtgcatccgctgtatgtcgacctgcgcgagcggctctcccgcctgaatacggccgcgcaggagaacatcgcgggcaaccgcgtcgtcaaggcctttgcacgcgaggactacgagatcgcgcgctttgacgagaagaacgaggattacaagcaggcgaacctcaaggccacgctgctgtggctcaaattctcgccgtatatcgacggcctctcgcaggcgctctcgatcgcggtgctgctcgtgggcggcacgttcctcatcatcggccgcatctcggtcggcacgttcgcgctgttcaactcgctgtgctggacgctgacgaacccgatgcgcacgctcggcatgctcatcaacgatctgcagcgcttctttgcctcggcctcgaaggtcatcgagctgtactacgcgcgctccacgatcaccacgcgcgccgacgccgtgaacaaggcggagcgcgtggcgggggccgtttccttcgaccacgtggatctgaagctcaacggcgccgaggtgctgcgcgacatcaccctcgacatcaagccgggcgagactgtcgcgatcatgggcccgaccggctcgggcaagacctcgctcgtcagcttgatcccgcgctttgcagatgtctcgaagggcaggctctgcgtggacggtgtgcccgtcggcctgtacgacctgcacaagctgcgcagctcgatcggcatcgcgacgcaggatgtgttcctgttctccgactcggtggacggcaacatcgcttacggcaacccagacctgtctgaggaggacgtgcagcgctttgcgaagatcgcctgcgtcgattttgccggcaagctgcccgagggctttgacacggtcatcggcgagcgcggcaccggcctttcgggcggccagaagcagcgcatcgcgctggcgcgcgcgctcgcggtccgcccgtcgatcctgatcctcgacgacacgacctctgccgtcgatatggaaaccgaaaaatatattcaggagcagctttccagcctcgactttgcctgcacgaagatcatcgtcgcgcagcgcatctcgacgacaaagcgcgccgaccgcatcgtgattctcgataagggccgcattgcggacatcggcacgcacgaggagctgatcgcgcggccgggctattaccgcgaggtttacgagctgcagaacggcatcacgaaggaagggggcgctgcgtaatggccagaaaccgcttcgacgtcgatgaatcgctggaaaccccattcagcatcaagcatctgctgcgcgccggcgtgtatatcaagcggcacgcgaaaaagatggtgctttcgattattttctccgcaatctccgcggcctgcgcgctgatcggcccgaagctgatcgaaatcgcgctgaacgacgccgtgccgaacaaggattttccgcagctctttcttctggccggcatcatgctcgtctcgatcgtgctttcaattctgttttccgtcaagcgctcgcgctacatgaccgtggtggggcaggagatcatctacgacatccgcaaggatctgttcgagcatttgcagcggctgtccttccagttctacgacgaccgcccgcacggcaagatcctcacgcgtgtcataaattatgtcaactccgtttccgatgcgctctcgaacggcattatcaactttgtgctcgaaattttcaacctgattctgatcgccgtctttatgttcctttgcgacgtgaagctctcgctggtcgtcatggccggcatcccgctgttcctcctgatcgtgctgattttaaagcccgcgcagcgccgtgcctggcaggacgtctcgaacaagagctccaacctgaacgcctacctgcacgagagcctcgacggtatgaagatcacgcaggcgttcacgcgcgaggagaaaaacgccgagatctacaacacgctgaacacgaagatgtacaagagctggatgaaggcgcagatcacttcgaacctcgtctgggtctcggtggataatatctcgacgtgggtcgtcggcgcaatgtacctgatcggcctctctctgctcgggcccgcggtgcagatcggcacgctgatcgcgatctccgcctatgcgtggcgcttctggcagccgattctccagctttcgaacctctacaacacatttatcaacgccgtggcgtatctcgagcgcatctttgagatgatcgacgagccggtcactgtggccgacgcgccggacgccgagacgctgccggagatccgcggcagcgtgacgttcgacgacgtgacgttctcgtatgacggcaccatcaacatcctcgagcacttcaatctcgatgtcagggcgggcgaatcgatcgcgctggttggcccgaccggcgcgggcaagacaactgttgtcaacctgatctcgcgcttctataacattgattcgggccgcgtgctcgtcgacgggcacgacatctccaaggtcactctgcattccctgcgcgcccagatgggcatcatgctgcaggatagcttcatcttctccggcacgatcatggataatatccgctacggccggctggatgcgaccgacgaggaggtcatcgccgcggcaaagaccgtgcgcgcgcacgactttatcagcgagatgcccgagggctaccatacgcaggtgaacgagcgcggctcgcggctttcgcagggccagaagcagctcatcgcctttgcgcgcacgctgctctccgacccgaagattctcgtgctcgacgaggctacctcgtcgatcgacgccaagaccgagcggcttttgcaggagggcctgcaggcgctgctcaagggacgcacaagcttcatcatcgcgcaccgcctctccaccatcaagcactgcgaccgcattctctacatcgcgaacaaggggatcgccgagtgcggaaatcacgacgcgctgatcgccgcgcgcggcaattattatgagctgtacacggcacagcttgagtcctaacggatggagaccacaacagcttgaagccgtaaatcaaaattgttataaaaatgccctgcttccgcttcggtcggaggcagggcattttccgtagaaaatcaaaggactactatattgtggcatacgttcacgttttagcgtaaaaagggggtgtcaggagacgttgtccatctggaggcagagcttgtcggagatcatcgcaataaattcgctgttcgtcggcttgccacgggtattatgtatcgtatatccgaaataggaattcaggacgtccacgtcgccgcggtcccatgcgacctcgatcgcgtgccgaatcgcacgctcgacgcgcgagctcgttgtctcatactgctttgcaacgctcgggtaaagctgctttgtgacggcattgatgatttccggctcctcgattgccatgatgatcgagtcccgcagatagtggtaacccttgatgtgggcgggaacgccgatctggtgcagaatctccgtgacctgaatgcgcaggtcggagcggcttgtgcccgccgcagccgcgtggctggaggcccctgtaagcgcgagaatgcggtcgatcatctcggccttattgtagggctggatcgcgaaatacgaggcgccggcctccatgacctgccgctcgagcgcgggcgcggaatacgaagcggtcacaatgaaaacgggctccgaaagcccctcgcttttgaccgcatgcataacgcccagtgcgtcgaggccgggcataaaaagctccataatgacggcgtccggtttttcctcccggatccttgagagcagagccgcaccgttccttccggcgatcataacttgtgcgcctttggccgaaatggcgtcggtattttcccggctccattcgccgtcatccgcacaaataataatctttatttgtttttccatgacttacctcctgcgtgatttgaattgtgaacaaattctaccatatacgccgggctattgcaaggggaaagtctgagaattgacaagaaaatttgttgtaataaagcgtcgaatgcggtataaaatgatcaaaattatagtatttgtggcgttatccggctgaatttgcgatgaaatcttttttttcggtgtgccggcggtttttagttaaaatgccttgaaaagtggggaaaaagccggtataatagccgtaaagagaggaaggaggcggtgaaaagcatggagctgcgcgttctgcggtattttttgatggtggcgcgggaggaaaacatcacgcgtgccgccggccttctgcatgtgacacagccgacgctttcgcgccagctcatgcagcttgaggaggagcttggggtgaagctgtttcaccgaaacaaataccgcatgacgctgactgaggagggcatgctcttaaagcagcgcgcgcaggagatcgtcgcgctgtcggacaaggcgaaggcggagctttcccgcagcgagggcgacctcaccggcgccgtctcgatcggctgcgccgaagcgcgcagcttctccgttctggccgagcagatcgtcgctttccgcacggttcacccgcgggtgcgcttccacatttacagcgcgaccgccgacgatgtgaaggacagaatggaaaaggggcttttggatatcggcttcctgatcgagccggtcgacgtcagccggttttcgttcatccgcatgccggtgcgcgagcgctacggcgcgttggtgcgcagggattcgccgctcgccgaaaaagaggccgtgcacccgcaggatctgcttggcatgccgatcctcttcggcaatcgggacggcgtgcgcgacgagatcgccgggtggttcggcgatctgttcgacagcatggaagtcgccgtgcggtacaacctcatccgaaacggtgcggcgctggtggaaaagggcgccggggtggcgctgacgatcgatcaggacaacatcggcgaaaatctgcgctttatcccgctttctccggcgctggagatcggctcggtgctggcgtggaagaatttgcaggcctatccgcctgcggtgcgctgtttcatcgagcacttgaaaaatacaatttgagcatttttgaatatacagcataggtattggacattgctgtgaacttgcattacaatgaaggcgtcccgcggcgggcgccttgttttttggcagccgaagcgctgcgcacagcgcgtaaagaaacggcacgccggaaggaaagaccggccgtgcggcggcaatgaaagctactaacggagggaatttattatgggtggagttctcagccggctgatcgagccgaaagcacagctcccgaaggcgcgcatgcgcttttctgatgcggacatcaaaaagctcgtggtgccgctgtttttcgagcagcttctcgtgatgctcgtcggcatcgccgacacgttcatggtcagctatgcgggcgatgcggcagtttccggtgtctcgctcgtcaacatgttcaacacaatttttatctacctgtttacggcgctggcatcgggcggcgcggttgtcgtcagccaatacatcggccgccgggagcgcgcgtccgcgaatttatccggcagccagctcctgatgttttccacactgctgtctgcggttctgatggcggtctcgctcatctggaaccggcagatcctccgccttctgttcggcagcgtggaggcggacgtcatggaggcgtgcgtcacctacctgcgcatctcggcgtactccttcccggcgatcgcggtgtataacgccggtgcggcgctctgccgaagcatgaactgcaccaaggtgatgctgtacatctcggcatcctccaacgtcatcaacatcgccggcaatgcgatcggcatctttgtgctgcatgccggcgtggcgggcgtggcttacccgacgcttctgtcgcgcatttttacggccgtggccgtcaccgtattctgcttcggcaaaaacagggcggtcgcgtatcggctgcgggatattctgcgctgggacggcggcatgctctggcgcatcctgcgcgtcgcggtgccgaacggcgtggaaaacggcctgttccaactcatcaaggtcgcgctgagcagcatcacggctctgttcggcacggtgcagattgcggcgaacggcatcgcgcagagcatctggtcgctggcggcgctggtcggcgcggcgatgggcccggcctttgtcacggtcatcgggcagtgtatgggcgccggcgacagcgaggcggcggaatactacatgcagaagctgatgcgcatcacgcttttgatctccgtcgtatggaatgcgctcgtgttcgcggccacaccgctgatcatgcagctttatccgctcgacggtgcggtcacgcagctcgtcgtcgtgctcgtcctgatccacaacgtgttcaacgcggtgttctacccgttttcgggcgtgatgccaaacggcatgcgcgccgcaggcgacgtgcggtatgcgatgctcgtctcgatcttttccacagccgcctgccggctcgtcctgtccgtcgtgctcggcatctggctgaacctcggcgtgatcggcgttgcgctcgcgatgtgctgcgactggggtgtgcgcgtgattttcacgctgctgcgctataaatccggaaaatggaagcgtttccgtgtgatctgaccgtcagaaagcacaagcggacgcgcggaatcttgtggcggatgcggcttgtgcgggccgcgcgaatgcagtacaataggcctcagaaaggcaaatcgatttgccggatttggaggcgttgttatgttcaacggtttaggcatgcacatgggcaatctttcgcgcctgtcggacgcaaagacccgctcgatcagcccggagaatttcaccggggaaaaggggaagggcggcatgtgcccgctcgaaagcggttcggcgcgcaatgcggcgcgtgacctcggcacgggctggaaggtgaacccgtatatcgtcatcgagccaggcgcggtgtttgagatcgcggacatcgagggccccggcgcgatccagcacatttggctgacgccgaccggtcagtggcgcagcacgatcctgcgcatctactgggaggaacaggagacgcccgcggtggagtgcccgatcggcgatttcttctgctgcggctggcaggaatacatgcagatctcctcgcttgcggtctgcgtcaatccgggcagcgcgttcaactgctactggacgatgccgtttcgccggcggtgccgcatgacgctcgaaaaccgcgcggacgacccggtgacgatgtactaccagatcgactacacgctgaccgacgtcgggccggactgcgcctatttccacgcgcagttccgccgcgtgaacccgctgccgtacaagggcgtttacacgatcctcgacggcgtgcgcggcaaggggcagtacgtcggcacgtacatggcgtggggcgtcaacaacgccggctggtggggtgagggcgagatcaaattctacttggacggcgacgccgcatacccgacggtctgcggtaccggcacggaggactatttctgcggctcctataatttcgaggacccgaaaacccacgaccgctacgtttccttcacgacgccgtacaccggcatgcaggctgtgggtaccgatgcgctctaccgttcgcagaagcgcttcggcctctaccgctggcatatcatggaccccgtccgctttgaaagcgacctcagggtgacgattcaggcgctcggctggcgcagcggcgggcggtatctgcccttgcaggatgacatcgcctccgtcgcattttggtatcagacgctgccggcggcgccgttcccggttctgccggaccgcgacgcgctcgagatcatctgagtgcgggtgtggtaaaataaaaaaggccgccccgggcggcgctgcggagtgcagcgccctgctcaggacggctctttttgtcagcgcagggagatttcctcgggtttgtcgtcaaaaatgccggtctggaattcccggcggcccggcagcttttttggcacctccatgctgtgcagctcctgatacgactcgtattcgtccggcgtgaccggcggcgtcggcatcaggccggtgcactcgttggcggaggcggtatcggaaaggttcgggaaaatttcgacgtgctcgccgtactgaaagcgcttttcttccatatccttcataaaagtgacctgtcctttctgctgaactgggcggtgctgaaaatgcgatgcggcgcccgcaaaggcaggcgccgcatcgtgctttcagcgctgcgcctttacaaatagactgcgcagcggacaagcgattatgcaaaaagcaccggcagcaaaaccgccggtgcttttgaggtttttcgaaaaatcagagcttcgtgacgttcgccgcacggagcttgccgttcttcgggtcagtctcggtctcaaacgtgaccttctggccctcgttgagcgtcttgaagccgtcgccctgaatcgcggagaaatgcacgaaaacatcctcgccgccctcatcgttggagatgaagccgtagcctttttctgcgttaaaccattttactgtaccgttgttcattgtgggtacctccgttaaaaataactcgtgctcgtaaacgccatacaaaaaaacgcagcccttgtaaaccacaaacatgacttacaagaactgtgagacattgtttttgtttattacacttatcaaagtataacagcttttcctctcaaagtcaatcgggtttcaatatttatttttgcgcgccgcatcctgtgtatggcgggggagcagacagcgcggttttcagggggcggaaggcggcgccgcgggctttttggctgggtgtacaatagggcccggccgggcaggatacagtgcggaaaggggcggatttaggcgttcatattcgcttcaaaaaaacttctgataattttcacgaaaatgaaatgctcttttcacattggccctatatactataaccgtgctcaggagagaaagcacctgacacactttcatttacttccttcatttcctttttttctacgaaccggaatgtcagccgcccggcatcgggcggattccgatttgaaacttacccccactttttataactgtcctctgccggcattgcaagccggcagtgcggcagaccaaaagcaatcgcctttgcgcattcggaattgtatccgttgtgcagaggtgtttttaatttccgcaaatacttttcgaatggggtggaacgataatggtacggaagagcgcgcagcttttccgaaaaaagaagggggatgaaaacgcattgcaaaatgaaaatgaagcgctgggcggcgcgcggaaaaagcgccgtgccgtttcggtttcggaaagcatccgcacctttgcggcggctgtcggcacaacagccgttctgatgctcacggtctgcggcgtctttgacctgtatctcacacaggaggacggcccggagaacgtgcgcgcagcttccgttttcggcggcacggccgagtcggcgcagagccgcacggttcagctcggcggcgatgtgttcggcatcaagcttttttccgacggtgttattgtagccgcgctttcggacatttataccgaaaacgcggtgtgctgcccggcaaaagatgcgggtatcgaggcgggtgactacgtgctttccgcaaacggcgcgccggtggagacgaacgcggcacttgccgcggtgctctcctcgggcgatgccgtttcgctgacgatgcggcgcggcgaaaggacgtatgagacgacgctgacccctgtgcgtgccgacggcgtattcaaggcgggcatgtggattcgggacagcgcggcggggatcggcaccgtgacattctacagtgcggacggcgcgtcctttgcggcgctaggccacggtatctgcgattcggatacgaaggatgtgctcgcgatccgcaccggcgagccggcggccatttccatctgcggcatcgagccgggccgaaccggtgagccgggccgcctgcgcggatacttcaccggcggcgacagcctcggcacgcttacgcagaacaccgaactcggcatttacggcacgctgaaaacgctgcacagcgggcagacggtcgaggtgctcgaccgcgcggccgtgcacactggtcccgtgcagatcgcggcgacgatcgatgaaaacggcgtgcagcttttcgacgcggagatcgagcgcgtgagcacggacgcgcggcaggagacaaagacgctcgtcgttcgcgtgacggatcccgacctgcttgcagaaacaggcggcatcgtgcagggcatgagcggctgtcctattttgcaggacggcaagctcgccggcgcggtgacgcatgtttttgtggatgatccgacacgcggctacggcatttttgcggaaaccatgctggaacaggccggatagcggcggcaagggctcccgagcgatcgggcgcccttgttttttgccttgcgggcacaccgggtgatcctgtggtgctgagttttccgcaacgcagctttcggcctctcgttttgtgcgtgcggaaaatcggtatttactgtaaaacaaaatataattattgaaaaacgataaaaatatgttgacaaacaagatcgtgcgtgctatgctttccgtaaagaaacagaaaagagggaatcctgtgttcagaatatccgaaaaagcatccaccgtcctctcactgatttttaccggcgcggcgctcgtgctgctcgtcgtgctgacctgcacgctgccgtcgatcatcggctggtatctggaaatcaccgcgcgcccggggctggaccgcacggcggtcacggcgctgctctacgcggcgcttgtcccggcttatacggcggccttcgcgctgctctctttgctgcgcaaggtgcagcgcgaggcgatctttaccgacaaggccgtcggcaatctccggctcgtctcctactgctgtctcgccgaatgcgccgttttcgcggttttgaccgtctatttccagtttgcggccttcatcgcctttgcgtcgctgttcatgtgcgtgatcctgcgcgtcgtgaaaaatgtgatcgccaaggcagccgaggtcaaggctgaaaacgactttacgatataggagggcgcgctgtgatcgtagtgaatctcgatgtgatgatggcacggcgcaagatgccgctcaacgagctttccgagcgcgtgggcatcacgctggcgaacctttccattttgaaaaacaacaaagcgaaggccatccgcttttccacgctcgatgcgatctgcaaggcgctggactgccgggtggaggacattctcgaattccgcagcgacggggaagggggcgattcacatgaatgatatgccgctcagcgcgccgcaggccgctttgcctgcgccggtgattccggcaaggcggcggtacacgctggcgcagaagctgttggcggccgccgtgctgctgctcagttacttttacatccgcatgttctttttctcgccggctggaatcgggcgcacactgttcgttttccttttgctcgccgtttccgcggcgtatatggcgcacgcgaaaatccggccgaatgcggcgtccattgcggcgggcgcgctcacagggttgttctcgctcgtgtttgcgctggtgccgagcggtatgctgaccttttttaccgcggcgttctgtcagttcggctacacgtatttcgtctacaaatcgatggacgtgcaggttgagccgcggcccggccgcttcttcgatttcgatttgctcaaggcggttttcgcgatgccgttcgcctcgttcggcgcgctgttcccggcgctctttaccgtgcccctgaacggaaaagcgctgggggagaaaaaagcggcgcgcacggtcggcctcgtgctgctcgggcttctgctctcggttttcccgaccgctatcgccgtttccctgctctcgtttgacgcgggcttccgcgcgatgctcgacgggatctttgccttcgagctgccgcagttcagcttttttgagcaggccgtctacatcgtgctggctctgcccgttgccatgtacatcttcggcctgtggatctccggcagccgcggcgcctgcgcgggcatgcgtgcggaaagctgcgcgcgcttccgcacggcggcgcacattctgccgcgcaccgcggtcgtcgcggcctgcgtgccggtgctgctcgtctacctgctcttttttatcgcgcagctcccgtatttcacctcggcattttccggcgtgctgccggcgcagttcacccacgccgagtacgcgcggcagggtttctttgagctgtgcgcggtccttgtgctgaacggcggcctcgcgtacctgctcgccctgtttgcgaaacgcgcggggaaaaacacggcgccgcgcgtctgcatcgctttgctcagtgccgcgtcgctgatcctcaccgcgacggctgtctcgaaaatgctgctctacgtcgatgcgttcggcttgacgctctcgcgcgtctacacgctgtggttcatgctggccgccgcgctcgtgtttctcctgctgctcgcccgcgtgatttcgcgccgcgtgccctttgtgccgcttgcgctcgccgtgtgcaccgtgatgttcggcgttctggcgttttccgatgcgccgtcgtttgtttcccgctgcaatgccgaccgcgtgtgcacgggcgcggattggacgctcgaccgcggctacttcgagcagctcggcgcgagcgccgtgcccgacgcggtgcggctggagagcgacccggccgccgaccgtgtgacgcgctcgaacgcgcggcgcttcctagacgattacacgctctaccacgaggacggcagtgggctcagcttcaacctgacggagcaccgcgcgcggcaggcgctgcggaacagagtgccgcaagggacagacatttaaatgcgcaagacgcaaaaaaagaccggctgaacgggaaaagctcccgcagccggtctttgcttgtttgattttcgcgcggcctcagcagtccttgagaagcgcttcggcctcccgcaggctgatgtccttttcgcgggcgacgcgggcgagatcctcatactcgtatttcgcgcggcgcacgccgtagccggaggaggttttacggcgtaccgggccgcagggcgtctcgagcgtttcgagtctgcggtcgagcacatagcggcgcgtagccgcctcgcgcacgccgatcgtcgtcgtgtgccggaagagcagggaaagcatcgcgtcgcggtccggctcgcggcacatcacgcgcagcagcgtgccggggcgggatttcttcatgccgatcggcacggtgtaaacctcgagcgcgccgcctgcaaaaaggcgctccatcgcgaagccgacggcctcggcggtcatgtcgtccacgttgcaggaaagctcgagcaccgtgtcgccgcggctttcggcttcgccgagcatggcgcgcacgcagtttgcggcctcaaaatcctttttgcccatgccgtagccgatcgcttcggttttcatcgcgggcatcgtgccgaagcgcgtggcgaagtgcttgagcagcgcggcgccggtcggcgtacagagctcgccgcgcacgtcgccgccgtagatcggcacgccgcgcaggataaacgccgtcgccggggcgggcacgggcagaatgccgtgcgcacagcgcacctgaccgctgccgacgtgcacgggggagacgatcacctcgtccggcgcgagccggtgcatcagcaggcagacggcggtgacatcggcgactgcgtccagcgtgccgacctcgtggaagtggatctccgtcacgggcacgccgtgcgcgtggctttcggcctcggcgatcaggccgtatacggccatcacgtcgtcctgtacggcctgcggcagatgcaggtgaccgcgcacgatgtgctcgatgtcgtgcagtccgctgtgatggtggtggccgtggctgtggtcgtgcggatgctcatgatcgtgcggatgctcatgatcgtgcggatgctcatgatcgtgcggatgctcatgatcgtgcggatgctcatgatcgtgcggatgctcatgatcgtgcggatgctcatgatcgtgcggatgctcatgatcgtgcggatgctcatgatcgtgcggatgcccgtggtcatgcggatgctcgtggtcgtgcggatgctcatggccgtgcgtgtgctcatggtcgtgcgtgtgctcgtggctgtggtggtcgtggctttcctcctccgcgccgtgtacggtgaccgccatgtgcgtgccggtgatcccgcatttcacggcaggctccgcctgaaagtgcacgcccgggatgccgaggccgttgagctcgtcgagaaacgcatgccggtcgggcagaagctcgagcagcgccgcggtcagcatgtcgccggcggcgcccatgccgcagtcgagatatagggttttcataggcttcagtcctttctgtttcggttcaaagcgcgttcagccgttttgcggccgcgcgtccatgtggttgatcatgctggcaaggtagcccgcgccgaagccgttgtcgatattcacaacggagacgccgctcgcgcaggaattcagcatcgagagcagtgccgaaacgccgccgaacgacgcgccgtagcccacgctggtcggcaccgcgatgaccgggcagtccgcaaggccgccgatcacgctggcgagcgcgccctccatgccggcgatcgcgacgatcacgctcgcggacatgatggcctccttgtgcgccagaaggcggtgcaggccggcgacgccgacgtcgtacagccgcacaacctcgttgccgagcacctcggcggtcagcgcggcctcctcggaaaccgggatgtcgctcgtgccgccggtggcgacgacgattttgccgatgccgctcttttcgggcatctcgccgatgatgccgacgcgcgccgccgcatggtagtgcaggtcgtgcgccttctggacgatctcggcggcttccgccgaaagccgtgtgatgaggatcgtgttctgcccgccgcgcttcatcgtttccgcgatgccgatgatctgttccggcgttttgcccgcgccgtagatcacctcggccgcgccctggcgtaccttgcggtgcaggtctaccttcgcgtagccgatgtcctcgaacggctcggtcttgatgcgcagcagcgcgtcatccacattcatttcgccgcgctgcacggcctctaaaatctgtttgacttcgttgttcatttgcgtacctccagatccagcatgacggcgctgtatgtttttttgagctctctaaggatctccgcccggcgctcgagcagccgcggaagctggttttcgggaaattgcagccgcgcggcgccgtttgagagccgcacgcggaaatccgtgaagccgagggagaagaggaaatcctcggcgcgctcggtgttttcgagcttttcgagcgtcaggcgctcgcccgaggggacgcgcgtcgcaaggcacgcgtaggcgggcttgtcccacgtgaacagccccgcctcccgcgagagccggcggatctcgggctttgtcagcccgcattcgcgcagcggcgagcgcaccgaaagctcgcgcagcgcgcgcatgcccgggcggtcgcccgcgtcgtcggaggcgttggtgccgtcgagcagcagcgtgtagccgtcatcggccgccgcggccgcaatcgccgaaaagatgcgccttttgcagtggtagcagcggtcggcgggatttgccgcgaccgcctcgtcggcgagaacgtcgagcgtgagcacgcgcatatccgccgaaagcgtttcggcgaggcggcgcgcgtcatcgagttcaaactgcggctgaaaggcggatttcgcgtaataggcgcgcacgtccgcgccgcttttgagggccgcgcagagcaggtaggccgaatcgacgccgccggaaaaggcaatcgccgcttttttgttttccttgaaaaattccgtgagagtcatggtatcggtcctttcaaagggttaaagattgctgtgcctgcggctgaggctctttctgagtgcattgctcagctcggtgacgcacatcagcgtcacgacgaggaacgcgccggggatcacgatgatccaccacgcgccgctcatcatcgcgcgctcggcgagcgagagcatgctgccccacgagatgatctcgagcggcaggccgatgcccatgaagctcagtgtcgattcagcgacgatcgcgccgcggatgttcataaccgccataaagaggatggagggcaggaaattcggcgtcaggtgtgcgcagaggacatggaaaaagccgccgcccatacattttgaggccgtgacgaaatccgcgctgcggagctgccgcacctcggtgcgcacgaccttcgccatgctcatccagcctgtaacgccgaggacgagcgagaggctcagcacgccggcctcgccgaggatcgattgcagaaagaggacgacgagcagattcggcacgctgaggaagatttcggtgcagcgcatcagaagtgcgtcgagccacgcgggcgccatgccgctcagcgcgccgagcagaatcgcgatggcggcggagatcgcggccgaaagcaggccgatcaaaagcgagatgcgcccgccgtaccagatcatcgagaagatgtcgcggccgagcgcgtccgtgccgaataaaaattcgcggctcggcggcgcgctgtaatgggcgagatccatgtaggtcgggtcctttgtcatgatgagctccgcaaaggcgcagccgagcagaatcagaagcagcagcgcggcggcgagcacggggcgcctgcggcgcgtcttttgttttttcggcgccggcgcagccgccgcggaccgcatgccgacgatcgtgaagcgcgggtccgtcatgcgaccgcctccgtttccatatcccgcaggcgcgggtcgaggcgctcgtttatgatctgcgcggcgatgccgcacaggatcaccaccgcgcccgagagcatgcagacgagcatcaggagattgtagtcctgataccgcgcgctctcataggcgagcgtgccgaggccggggtaggagaacacggtttcgacgatgtaggtgccgccgagcacgtgcggcacagagaccgccgcgaggctcaggaaagcgggcagggcgttgcgcaggcagtgcctgaaaagcacggtgcggcgcgaaagccccttcgagcgcgcgaagagcacgtagtccgcgcgcacctcctcgagcaggcggctgcggatcatatacgcataataccacaaatgcccgagaactacaaccgtcagcggcagaatcaggtgccaaagccggtcgccgaaatcgcccgcctttccggccgtgtacgcgccgctgctcggcaaaacacgcagatagaccgcgaagagcagaagcaaaacgagcgagagccaaaattcggggatgcagctcgaaaacgtgccgagtctgcacaaaatgcggtcgggcaggcagtcctccagccgtgcgcacagcacgccgagcagcagcgcgagcgaaaaggtcagcacaaagcccgtgccgccgagcagcagtgtgttgccgatgcgccccagaacgacctgcgccgcgtcctgcttgtatttgaaggaaatgccgaaatcgccgtgcagggcgttttcgagccagcgcgcgtactgcaccgggatcgaatcggtgaggccgagcttttcctcggcccaagcgcgctcctcggggctcatcttttcggcgcggtcgccgtagtaggagacgagcgggtcgccgggcgcgagccgggagatgcagaaaacggcggcggagagcacgaacacgctgacgagaaacagcagcagctttttgccgaaataggcgagtgtttttttacagcgcatcgaacccctcctctaaaagcacgaaatgacccggcgcggcctctctgagagcgccgcccggaagcggcgcgtcccggtacggtgcgatcttccgcgcgcgctcgagacgcggatccgggatggggatcgaatcgagcagcgccttcgtatagctgtgcagcgggttctgaaacagcgcctttgtgggcgcgacttcgacgaggcggcctcggcagagcacgccgacgcggtcgcagagaaattccaccatcgcgagatcgtgcgcaataaacagcagcgtgaagccgttttcgcgctgcagggcgcggaacaggttgacgatctgcgcctgaatcgagacgtccagcgcggcgatcggctcatccgcgatcaaaagcgccggctgcatcagaagcgcgcgggcgatcgcgacgcgctgccgctgcccgcccgaaagctcggggggacagcggtcgagatacgcggcctccagcccgacgcgctcgagcgccaaggccatctgtgggcggagcgcgtgccggggcggcgctgtgcgcgcgatgcgcagcggctccgcgaggatgtcgagcaccttcatgcgcgggttgaggctcgaatcggagtcctgaaagatgagctgccgcgccgccgagagtgtgcggcggttctgccggcgctgcttcgggtcgaggatgtcgatgccgttcagccggatgctgccggacgacggctttatgatattcatggcgcaccgcgcgagcgtcgattttccggagccggattccccgacaagcccgaagatctcgccgcggctaagctgcagggatacatcgcaaagcgcgtcggctgccgtatggagcgacagccggaagcggtgcgaaaggtcctgtatgtcgagcaggatgtcatccatcgtgcagcctccttaccgggcattcgattttcggcgcgcgcgggtcaagcagccacgtggcggcaaaatgcgtgtccgaaatgcggaacatcggcggttcctcctcatagtcgatctgcatggcgtatgcgttgcggggcgcgaacgcatcgccgggcggcgggtcgatcaacgtcggcggcaggccggggatcgccggcagcgtgtccgccccctttgaaaaggcgggcagcgcgcgcatcagcgcccatgtgtacgggtggcgcgggttgtagaagatgtcctccacggttccagtctcgacgatttttccggcgtacatcacggccacgcggtctgcggcgcgcgctacgacgccgaggtcgtgcgtcacgagaacggtcgccgtgccctttttttgctggatctcccgcagcaggtcgagaatctgtgcctgcacggtcacgtcgagcgccgtggtcggctcgtccgcaaagagcagcagcgggtcggcggcgagcgcggccgccattacggcgcgctgacgcatgccgcccgaaaagctgtgggggcagagatgataccgctccatgccgcgctcgatgccgacaagctcgagcaggccaagcactttttcgcgcacggcgctttcgggcaggcggcggttgtgcgcgcggacggcctcggcgatctgccggccgaccgggatcgtcgggttcagagcggtcatcgggtcctgaaataccatcgaaaacacgcggccgcgcagcttgcgcatctcgcgctcgcggtaatcggtgatgtccgcgccgtttacataaatccggcccgagcggatgcgcgccgcaggcggcagaagcttcatgacagccttgcacaacacgcttttgccgcagcccgattcgccgacgatcgccagtacctcgccgcgggaaagcgcgagcgacacgccgcgcacggcttgaattttaccgcgcggcgtgtcaaagctgaccgacagatttttaacacggagcagctcgctcacgttttcgccccctcgttttggagaattgcttacgattcgatcgtccattcggcgatgttccagaagatgccgacgccgtggtggcccatgacggtgtcggcgtcgatgcccgagatcgacgcgtccgccacataattcgcgtcgatgtagcagatgaacgcgaaggcagggtcatcggcgagcgccttctgaaaattcgcgtacgcctcggcgcgcaccgcgggatcgtccgattcgcgcgcctcggtcagatagcggtcgacatccgcgttcgaatagccggagtaattcgcgcccttatcggtgccgaacaccttgtaggtgtggtcgtccgcgtcaaacgggctgccccagccgatcaggtatgccatctggccgccccaatcgacctgcgcggggatgtccaccgtcacgtccatgccgatctcgcggagctgctgcgcggcgatctgcgccatatcgatgcgtacctgatcgcccgcgccgatactgattacaaaaccgaccgtcttgccgtcccgcgtgtaaaggccgtcgtcgccgagcacgcagccggcctcttccagcacggcgcgcgccttctccggatcgtaatcgtagtgctcggcgtcctcaaagttgtaggtgttgcgctgcagggggccgtaggccgccatgccctgaccgagcagaaccgcatcgatgatcgcctcgcggtcgagcgcgtagcagaccgccggaatcaggtcgcggttttcctgccagtattcgttctgaaagttgaagaggatgccgcggtagtcggccgtctccatgtcgtagcaggtgaagcccgtttcatccacaaaggtagccgcgtccttcggcgtcagcagcgcgagatcgagctcgccggcgcgaagctgcagggccttggcgttgtcgtccggcacgatcttgaacacgaccgtgtcgatattcggctcgcccttgaagtaatccgtgtttttttcgagcgtgatcgcctgcccctcgtcccagctcgcgagcttatacgggccggtgccgacggggctgcggaagaaatcggcggtctgcatgtcctcgccctccaaaaggtgcttcggcagcaccgccatcgtcatgtagtcgagaaacgcaacattcggcgcggagagccggaacgcgatcgtgtggtcgtcgatcacggtgatctcctcgacgtcctcgaagttcggcgcgttttcggagccgttttccgggtccatgatcgcttcgatcgtgaactgcacgtcctccgccgtgaacggctcgccgtcatgccagcgcacgtcctcctcgaggtggaaggtgtaggtgcaggtctcctcgtcgaagtcccagcttttggcgagtgccgggatcacggcgttgtcgccgtcgtggccggtcaggccgttaaacagcaggagattgatctcgccgtgctcgtccatcgccgggttgatgcgcgtgtaatcgccgctgccgtaaacgagtgttgtaggctctgcatcggccgcggcggatgccgtgccgtcagagatgcttgtactttcgcttgtgggactttccgtgccgccacaggccgctgtgccgagcgcaagcgcgagggcgagcaaaatcgcaaaaaatcttttcatagtggatttccttttttcctttcagtttcccgccgcaggccgctccacgatggaatacaaaaaagcacacgcctttttgtgaaaaagccgtatgccttcttggtatacataattcctgaaattaagggataaaactacctgcgcgaatcttctgtttgcggagcgcttcagcctccatgcgctgcttcgtgcagcatttttctttattatataaaaaccggcggtacttgtcaacattcagcgcggtggaggccgcgccgccattgacaaagcccgcaggaggctctacaataaggaaagaaaactgcgggattcccgcacaggaggcaaaaggactatggaacgaaaattcaggatcggcatcatcggctgcggcggcatcgcgaacagcaagcacatgccctcgctgacccgccagccgaacgccgagctcgtcgcgttctgcgacatcgtcgaggagcgcgcgcagaaggcctgcgaagagttcggcgcggagggcgcgaaggtctacaccgattataaggcgcttttaaaggacgagacgatcgacatcgtgcatgtgtgcacgccgaaccgcgagcacagcttcatcacggtcgatgcgctggaggccggcaagcacgtcatgtgcgaaaagccgatggcgatcaacggcgaggaggcgcagaagatgctggacgcagcggagcgcaccggcaagaagctctcgatcggctaccagaaccgctaccgcccggattcttggtatttgaagcgcgcctgcgaggcggacgagctcggcgaaatctactacgccaaggcgcatgcggtgcgccgccgcggcgtgccgacgtggggcgtgttcatcgacgagtacgagcagggcggcggcccgctgatcgacatcggcacgcacgcgctcgacctcacactctggatgatggacaactacaagccgaagctggttgtcggcagtgtattcaagaagctgggtggccagaaggaatgcggcaatatgtggggcgattgggacgcggagaagatcacggttgaggattcggcgttcggctacatcgtgatgcagaacggcgcggcgatctcgctcgaatcggcgtgggcgctcaacacgctcgacgtgatcgaggcgaaaacgacgctctgcggcacgaaggccggcgcggatatgcgcgacggccttcgcatcaaccgcgtgaagtataacaagtggacgaccgagcaggtcgacatcgattctgcgaacatcccgtaccgcggcgcgaagccggaaaaggcgtccgataccgaagcgcgtctgtggctcgatgcgatcgcgaacgacaaagaggttgtcgtcaagccggagcaggcgatcgtcgtcacgcgtatcctcgacgcgatctaccgctcaagcaaaaccggccaacccgttttctttgatgaaaccggccggccgatggagtgagataataaaaagcccttcctgctttaaaccatacaaaatgaaatggtttaaggcgggaaaggcttttactttttttaagtcatatcaatccaatccggatcgacccaacgattacgagtagcattccaacggcgatattggaggacaccattgtgtaatctatatttagtctcaataacatctgcgcgtggctgaatatccataactataaacctcctttcacgaactaatcaataatagtgaaaccatcctttttcatcatatcaacatacttttcgtcaacattagcgacggcaatattgtctacatataaggtataagttccatcaggattttttacgagatatgagttctcggcagaaacttcttctgttaccttatcagtaactatctcgtccttcggtacatcataatgcggctggatgatgaacgaatatgaaaatatgaacactgcagtcattataattagagttacaacaggaattacccgattgtacttcttctgatacgacgtgttcattattaaatctgctcgtttaactgttatgtgtttcttaggatttctgcaaaactttttagggcttgcagcaaactctgatatcgtaaatgaaccaagtcgaaatctttttctcttcgttggaagagaattaaaggtctttatcagcacctctatatattcgagcttttctggagactgcaaaagcctagaaacagactgatcacaacgcagttccaatgtccgattgaggtttattctcaacaggtaactacaaggattccaccagaagatgcaattaagtgcacaaacaagcaatttgatccacatgtcgtgctctttccaatgcatcagctcgtgataaaaaacatatctgtaatcttcttcgctgtaaacgttttccggaatgagaatgaccggatgccttaatccttgaatagaaggagattttcccttggaaatagggcaaaccgttggcacaggcagttgaagtttctttgcagcagcctctgcggcggaaagtatcaccggattttcagagggaagatatgcgcgaaccttatccatatgggtgcgataagaccaaatcgtggtaaaagaagcaatcagagtaccaataatccaaacacccaaaataatagctaacggtgtaatatgaccatagattataggtgtacgaagtccggcgtctaatttagctaaccagccttcgtgttgaataactctggtaaataccgggatgtcaatcggtacgaagcagcggagagctgccccgatgataatgatcagaagcggggccacgccgctcagctccagaatgtatttcccggatcgaaagcagaacaaaagcaccatgaatatgctacaccagattgtagccatcaaaatagaaaaatcagaaaataccatatgctaccttaaaacaattactcctgcgattcctcacgtaccaaggagtcgatcgacttgagaatggcctccttttgatcagaagatacgtcggagtaagagaacagggagcaaacaaggtccggaatatcgctcggtgagaagcgcttggacgaagtgagctggtgcgcatagtattcatttctgctgagcgccgggataaactggcgcgcctgatttttcccgtggccgcagccgccgatggaaatgatgtagcttttatccagaaggttgttgaccatcgcatgataggacgttctggcaaaggccgggccttccggagaggcgttgacatacgcgaggatttcagggccggtgatcggacgctgggcatcccaaagaatattcattaaaatgagttcggagttcgttaagggaccgccaacttccactttcttttttatcatagtgctttccctcctttctatagtatgttcttttaaaataatagcgtagtttttattatatgtcaacaggataaattgattaaaaatgcaatagaaaaataatatgtttttaacaaaaaaactgtttttaattcgaaatacagggcgattttatccgaaatttcccagaggtctcatatataacacctataaaataagtattgttggaaaaatatggaaagaaacttgcttaaaacggaagatttcaaaagtgtcgcctgtgagcggctgccttgtatgtatggtgaattatgataaaattccggaaaaaattgattgaatttattttgaggtatgagacaatttgaggtggattttccatgttttcagcaccgtgcctgcgcgtgtcagcggctctgcaaaggggagaaggcgcgcggagggctgccccaaaaacaaagacttggctttgtgtctgatttttaagacattgtcaggtttttttgcggtacagacggggcgggaccccggagcgtggaacgggtgtgcggaagcgatcggcaaaatgtacgagaaacgctcgaaatgaagccaaatagaggcggctttttcgttcgcgggacatctatattcgtgaagaacagagctggaacggatctcccgcccgctcgcttttggcgtgtctggtggatctgccacgcgaaaatgtcgcggcgctctgtgccctaaatgggaatctgcggggtatcggggcacatacgtccaaaatcgggagcagtcgggcggcgcggtggggagaaggggccgcagccgcccttgaaaacggagggataatagatcttgcggctgcgaggactctttcgaacgggtacagcggcatattcagagaatcaggaaaatgcgtccgattttacaggaaaaggccggcgcactatagatggaaagacatactcggcttcgttccaaatcggaggtgcttgtgggagcggcggagaagggagacggatgggtgggaaagcggtaaggccgtgatcgggcggaaagccaaaaaaactgcctgcggggcagacagaggcgagacgggagattctgtgcgggacgacaaaaagcccccggcgcaggccgagggcttttcatgtgatttcgttttgagttttggtgacggttatgttatttcgcgaagtcgaccgctctgctttcacggatcatattcaccttgatctgacccggatactcgagatcctcctcgatcttcttgcagatgtcgcgggcgagcagcgtcattttctcatcgttgatcacttcgggcttcaccatcacgcggatctcgcggcccgcctgaatggcgtagcagcggtcgacaccgttgaacgatgcggccacggcctcgagcttttcgagacgcttgatgtagttttcgatgttctcccgtcttgcgccgggacgcgcggcggaaatggcatcggctgcctgcacgaggcaggcaatgaccgttttggcttcgatgtcgccgtggtgggcggcaatcgcgtggataacggcctcgctttccttgtactttcttgcaacgtcaacgccgatttcgacatgcgagccctcgatctcatggtcgagcgccttgccgatgtcgtgcagaagaccggctctgcgtgcaacggtggggtcaaggcccaattcggaagccatcataccggcaaggtatgagacctcgagggagtggttcagcacgttctggccatagctggtgcggtaacgcaaccggcccagcagcttgacaagctcgtgatgaacgccgtttacgccggcggcaagcacggcgcgctcgccctcggctttgatggtggcatcaacctcgcggcgggctttctcaatggtttcctcgattctggtcggatggatgcgtccgtccgaaatcagcctttcgagggcaattctggcgacctcgcgccgcacgggctcaaagctcgagagcgtgatggcctcgggtgtgtcatcgataatcaggtccactccggtcagctgttcgattgcccggatattgcggccctcgcgtccgataatcctgcccttcatttcgtcgttgggcagcggcacaacgctgatggcggcctccgaaacatggtcggcggcgcagcgctggatggcgagggagatgatctcgcgcgccaatttgtcggactcttcttttgtctgctgttcgtactccatcaccttgatggccttctcgtggacgagctcatcctcgaggagcttcaagagatagtcttttgcctgatccacggtgaacgaggagattctttcgagcatgtcgatctggctctttttgacggattccgcctctttcaggcgatcctccgccttgcgcattttggaatcgacggcgttctccttgttttcgacgttctcgattttcttgtcgagcgactcttccttttgggagagccggcgctcctgccgctggatttccttgcggcggtcgttcagctcgcgctcggattcgttgcgcaggcgatggatctcgtctttgccctcgagcaccatttccttcttcttcgcttccgcggttttgatcgcgtcgctgacgatgcgcttggcctcctgttccgctccgccgatcgcgtcctcagcaactttctttcgatggttcacacccgcaaagaaagcgactgcaccgcacgcggcggcagccagaacggcaatgagaatacacagccaaatgggaagttgtggcattgggcacctcctttgctaggtttttattttattttcaaaaatcagatcgcagacagggtgcgttaatccctgcgaaacgacggcgcatcaaaatgcgcatatcattccgattacaattttatatcttttcatgccatatgtcaactgaaaattgaaaagcttcttttcagaatattcacacttccgacaaatatgcagaaaataagccggatttttttgcccgccgctccggaaaaaatccggcgcggggtgttgacatttttttaaaacggtgctagtatgaacaaaacggtgcagaagaggacgtccgctattcggcgcttctttcagagagcaggggccgccggctgaaagcccccgcaggagagaatgcggaaaaccgcctcggagccgccgccgaaccgggctgtgcccctgaaggcggacgttttgccgcgttaaggcagcgaatgaggtgcgaggtgccgggggtccggcgcgcatgaattcgggtggaatcgcgcaatgccgccccgaagtcccgctgagggatttcggggcgttttttatctctgagcttattttgaagagggaataagcggaaaggaaaaagctatgattcaagtcaatctcaagggcagcgaaaaggaatttgaaagcggcgtctgtgtggcggaggtcgcgaagagcatcggcatggggctttacaaggccgcgtgcgccgcgcgcgtaaatggaaaggtgtgcgacctgcgcacgccgctcacggaggactgcgaggtggagatcctcacgtttgacgatacggacggcaaaaaggcctactggcacaccacctctcacattctcgcgcaggcagtctgccgcctgtacccgggcacaaagttcgcaatcggccctgcggtggacaacggcttctactacgacttcgatttcgagacgccgattgccggcgaagatctcgagaaaatcgaggccgagatgaagaagattatcaaggaaaatatcgcgctcgagcgtttcgagctgccggcggcgcaggccatggagaagatggccggccagccgtataagcaggagctgatcgaggagcacgccgaggggggcgagcagatctccttctacgcgcagggcgatttcacagatctctgcgcaggcccgcacctgctcagcaccggctgcgtcaaggccgtgaagctcacgtcgatcaccggcgcgtactggcgcggcgacgcgaagaataagatgctccagcgcatctacggcgtttcgttcccgaagcagagcgcgctcgaagagcacctcgcgatgatcgaggaggcaaagaagcgcgaccaccgcaagctcggccgcgacctcggcctgttcatgctcaccgaggagggcccgggcttcccgttcttcctgccgaagggcatggtgctcaagaacacgctgatcgactactggcgcgaggtgcacaagcgctacggctatgtggagatttccacgccgattctgctgaaccgcgggctgtgggagcgctccggccactgggatcactataaggacaacatgtacacgacggtgatcgacgatgtgccgttcggcgtaaagccgatgaactgccccggcggcatgctggtctacaaggcggagccgcattcttaccgcgacctgccgatgcgcgtgggtgagctgggccttgtgcaccgccacgagctttccggcacgctccacggcctcttccgcgtgcgctgcttcacgcaggatgacgcgcacgtttttatgacggaagagcagatgaaggacgaaatccaaagcgtcgtcaagctgttcgacgaggtttactccgtgttcggccttaaataccagatcgaggtttccacgatgccggaggatcacatcggcgaaaaggaaacgtgggattttgcaaccgaaacgctgaagcaggccgtcaccgagatgggcaaggactacgtcatcaacgagggcgacggcgcgttctacggtccgaagctcgatttccatctggcggattcgctcggccgcacgtggcagtgcggcacgatccagctcgatatgcagatgcccgagcgctttgacctcgagtatgtcggcgcggacggcgagcgccaccgcccggtcatgatccaccgcgtggtgctcggctcgatcgagcgcttcatcggcgtcatcaccgagcactttgccggcgcgttcccgctgtggctcgcgcccgtacagatccgcctgctgccgatcgccgaccgccacatcccgtacctcgaggaggtcaaggaaaagctcgaggcgcagggcttccgctgcgagatcgatgcccgcagcgagaagatcggctataagatccgcgaggcgcagatgcagaaaacgccgtacatgctcgtcgtcggcgaccgcgacgtcgagaaccgcaccgtcgccgtgcgccagtacaagggcggcgatctcggcgcgatgacggtcgaggcgttcctcgaaaaggccgtgcccgagcgcgacaacaaggaaatccagtaacgtttttcggcggccggtgatcggcgcggctgaaagcgaagatatccgaatacggtaaaaaggcgcctgcctcccggaaaaccggagggcaggcgcctttcgttgtatgtaacctcttaaaatatccgtttatatgcggctcacgcgaacagcgcgccgagccaatcgaaaacgccgagatgctcgagcaggatcttcaggcccatcaaaatcagcacgatgccgccgagcagctccgcgcgcgacttgtacttcgcgccgaagatgttgccgatgcggatgccgacagccgcgaggatgaaggtcgtcacgccgataaagctgacggcggggacgatgttcacctgcaaaaacgcgaaggtcacgccgacggcgagcgcgtcaatgctggtcgcgaccgcgagcggcagcatggtcttgaagctgaaggaatcgttgagctcgtcggcgcattcgcgcgattccttgatcatgctcgcgccgatcaaggcgagcagcacgaaggcgatccagtggtcgaagctctggatgagagactgaaactgcacgccgagaagatagccgagaagcggcatcagcgcctgaaagccgccgaaatacaggccggcgatcagcatgtgcttcggccgcagctttttgaccgaaagccccttacataccgatacggcgaaggcatccatcgagaggccgaccgccaaaataaacaattcccatgtactcatttgtgtcaatgttcctttccttttagctccggcctgcgccccgcgcgccgaatcgcctgcgcttcgctggtcgaatcgttttccgttaatagagtatacgcgcgcggcagacaaaaaagacttatccgaaaagctatgcgaacgcctttcggataagtctcgtcatttcatgcagagccgtggggaagcgccccaagtgtgtcgaccgtgcagcgcattgcgccgactactcccttaaccgtatttatgatttaaccacagaatcacgggcttgtcaagaaaaatcgaaaaagccttgacaattcgccggaaccttgttatagtgtaactgtactaatacacatagtacggatgatacagagaagggaggagagcgatacgcacagaaaatgcgcgcaagggctgcggcgctttgcagggggcggcggcacgagagcctgcggcgtgtgcacgcaaagcggcaaggcgttctctgcgcggtattgcgggagatgatgctgtatatcgattacaaaagcgggcttcccatctacgagcaggtgtacaacggcattctgcggctcgcggcgctcggcgttttgaagccgggcgaccagctgccgagcgtgcgtgcggtggccgcacaggctggcgtgaacccgaacacggttcagaaagcctacgccatgctcgagcgagacggcgccatccagtccgttccggggcgcgggtcgttcctcgccgagcatgcgcagctcgcggacagccggcggcgcgcggcgctggaaaatctcggaaaggccgtggaggaggccgtgcaggccggcgtagcggaggaggagatcctcggcgccgtgcacagcggtatggaaaagggacgtacaggagaggggcgtggaacattgtgattgaagtgaggaatctgaaaaaatgctttgagggcgcgccggcgctcgagcaggtgaatctaaccgtggagcccggccgcatcatgggcgtcgtcggctcgaacggcgcgggcaagagcacgctgctgcgggttttgtccggcatttataaggcggatggcggcgaggtgctgatcgacggcgaggcggtctttgaaaacccggcggtcaaaaagcggctgtactttgtgccggataacccgtgcttcgagccgggcgcgacgcttttgagcaccgcaaggctcaacgcggcgttttacccgagcttttccgccgagcggttcgaccggctgcgcggcgtctttcagctcgacccgagaaagaagattgcggcgatgagcaagggcatgcagcggcaggcggcgctgattacggcgctgtcgatcgggccggattacctgctgctcgacgaggtgttcgacgggctcgaccccgtgatgcgccgccttttaaagcgcgtgatcgcgggcgaggtggccgaccggcggatgacggtgctgatcgcctcgcacaacctgcgcgagctcgaggatttctgcgatacggtcggccttctgcaccgcggcggtgtgctgctcgaaaaggagatcgacgagctgaagctcgggctgcaccgcgtgcaggtcgttttccgcgaaccgatgacggacgaggcgctgcacgggctgttcaacgtcgtttcggtcagccgcacgggctcgctgtgcacaatggtcgtgcgcggcgaccgggcgcgtatcgcgaagaagattgcatcgctcgagccgcagttctgcgagttcctctcgctctcgctcgaggaggtattcatcagggaaatggaggcggtcggctatgacttcgaagaaatcgtatgctaaatccccgctgttcgcggtgtttcgcacgcagctttacagccagcgcatgctgctgatcctgttcggcgtcgtgctggcgctggtgccgctggctgtgggggttatatcgctgaatccgagcgacgttacgtattcgtatgattatggtggaatcaatcattatattgccgcccagcgtcagcttatgacagtatgcgggctgataccgctgctctgctttgcactggcgctggctgtcggcgagttcgggtacctgaatcagcggcggaagctcgatttttaccacgcgatcccggttcgccgcagcgatatgtttttggggcgcgcactgctggcgtcggtatctttggtgctcggcgttttgctcgtcgtactcgggcagattctgatcgtgaacgtccaatttgtgacgatttcggtgggcggcggccgactagagcaggtctatgctgcgatctggaagaacggcgtgttcatggtgttttcggtgcttgcggcgtatttcttcgcggtactcgtcgtcgtcgcagcaaaaagtctgtgggaggcggcgttctccctcctgctgctttcggcggcgtatccgctctcggcgatgatcaccatccggattgtccaaagttccatgatgttctaccgcttgtcggatgatcccgtgatgctgacgctgttttcaccgtttgccaccggctttgtggccttgttcagcagtgcgtggacggcgctgccggtttgggtgcttcccgttctgctcctgcaggcggccgtgtgcggcgttctcggtttttgggcgttctgccgcaggccgagcgagcgtgcggaaagcggcgcttcgaaaggctttcgctgggccgtgcgcttctgcgcgtcggcggccggcgcgtttgtcggaagctacggtctgctgtattttctggatgcgtaccctgcctttttgttcggcagtgtgctgggcgcggctgcggcgtgggtggctctggaacttttatatgcacattcgctccgcggccttttgaaaacgctgtctgccggtgcggcgggctttgcggcctttgccgccgtcaatgtgctgatcgcattcggcttgatcggcggcatgacgctgccgacgatagatcaagtcgatgcggttgcgctgcatgggcagatgggcagctaccgcgatacgcagcgtgtgttcccgcgcctttccggatatctgaatttctcggatgaaaacggaagtcacaatgtacagaccgcgtcgtttgacacagagacggttgaggaaacgtatgcgctgctggaggatatgatggcgtaccagcgcgaggcgtattttccatatcacccgtcagagcgcgcaagggtgtatgaacgctgctggtttagcacggatacaagctgctccgtttctgtggcgctctatatggccggcacagagcggcggtttacgctggaggatctcgcgaacgagcggaccgaggcgatctgcaggcgagcggaggaaattgcgtgcacgccgcagtatgtggaaaatgacccgaacctcgcgcggtttgatgcgctcgagcgcatcgagggcgtagcggacgggcagcgcgtgcaggctgtgccgacggacgcggaaatcgaacggctccgtgaagcgtatgaaatggatgccttgaccgtgacggacagctcggcggataccgacgatcctgaagaggagctgtacctgtattttgatgaggaaaaagaaatcacgcttctgggcggcatcgtagactcccattatcccggcgagggcaggaagggcacgctggcgttggaggggtataaggaaaactccgcttttgtgataacaccaagcacctatccgaatacggcggcggtggtctagaaaatctgtgcggcgcacggatgattctcgccgcacagccgaaaacagccggcaaggctttcgggaaccaaccgaaaaaattcacgcagcacacgccgccccggcagggcacagaccttgccggggcggcgtatgtctttataaaaataaggacgtttttttctctaaatcacgtccttgcttttttgctccggccttggtatcctatagaaaatagataaaaccgccgtggaggagcggcggctgtacggcgtgaaaagccggaaaggatcgatcgatatgaaaattctgagaatgaaaacgaaccgcatcgtgaacccgctgggctttgacctgaaaacgcccgtggtctcgtggacggtggaggaaaccgcggcgaaaaaacagctttgggcgcgcgtggaggtcgcggcagacgaggacttttccacaatcctttttgacacgggggaaagccgcacggcgtcgtcgctcggcgtgccggtggatatcgcgctttcgccccgcacgcgctatttctggcgcgtcacggtctgcggcgacaacggcgagcgcgcggtgagcgataccgcgtggtttgagaccgcgaagctcggcgagccgtttgccggcgagcgcatttcaccgtgcctgcccgccgacacggccccgtatatgcgccgcgcgtttcaggtggagggcgaggtgctttccgcccgcgcgtacttcacgggcctcggcatctacgagctgtacgtgaacggcgaaaaggccggcgacgaatacctcgcgcccggctgcaccgcctacgaccgctggatccagtaccagacctacgacgtgaccgacctcgtgaaaagcggcgagaacgtcgtcggcgcggtcatcggcaacggctgggccaagggccgcttcggcttcgacggcaaggccggctgctatgagacgaacgaccccggcagcccgcacaacattttcacggacgaatacctgctgctcggtgagctgcacatcacgaccgacaggggcgaaaccgtggtcgtcacggacgagcgctggcagtcggcgcccgcaccgctcacgttcggcagcatctacgacggcgagcgctgtgacgcgcggctcgagattgagaactgggcgtcgccggcctgcatgttcgacggctggcagccggtgaagatcaacgcggaaacgcgactcggcagcctcacggcgcgcctctcgctgccggtcaaggcgaagcacgtgtttgtgccgaaggtcgtgcagacgccgaaaaacgagctggtgctcgacctcggccagaacatcacgggctggctgaccttcacggcggacctgcccgccggcaccgagctgcgcctgcagttcggcgagcttttgcaggacggctgcttctaccgcgacaacatgcgctccgcgctgtgcgaataccgctatatctcgagcggcagaaaagcgttcgtgcggccggtcgcgacgttctacggctttcgcttcgtgaagttttcgggcgtcgattcgttcgacggcattgaaaatattgagggctgggcgctgtactccgaccttgaacagaccggcgagatcgtcaccgcgaacgaaaaggtcaaccgcctgtacctgaactcggtctggagccagcgcgacaatttcctcgacgtgccgaccgactgcccgcagcgcgacgagcgcatgggctggaccggcgacgcgcaggcgttctgccccacggcgaactacaacatggactgcgccgcgttctatgaaaaatacagccgcgacctgctcgaggagcagaagctcgcggacggtaaggtgccggacgtcgcgccgctgatggtcagccgccgggcggatgagcagcacccgatgctttcttcgggcggcgggcactgcggctgggcggacgccgcggcgatcgtgccgtgggagacgtacctcgcgaccggcaacagagcgacgctcgaaaacggctacgagagcatgaagctctgggccgactggatctaccgctacgacgaggcgcacggcggggcgcgcctgtggcccggcattgaattccacttcgcggactggctcgcgctcgacggcccggaatccggcttcaacccggaatccgtcatgggcggcacggatgtgacgttcctctgctccgcgtactactataaatcgacggtgtgtgtcgcgaacgcggcccgcgcgctcggcaaaaccgccgactacgccgtgtacagcaggcgcgccgatgaaatccgcgatgcgatccgacgcgaatactacacgccgggcggcctgtgcgccgcagcaacgcagacaggcaacgccgtgtcgcttgatttcggcctcgcgccgtccttcgcgcgcgagaagattacggcgagcctgcgcgcactgctgaaggccgccaacatgcacctgaaaaccggcttcctcggcacgccctcgctctgccgcgcgctctccgacaacggcgcgaatgaggacgcctacacgctgttcctgaacgaggacctcccgagctggctctatgaggtcaacatgggtgcgacgacgatctgggagcgctggaactctgttaaccccgacgggaagatcagcggtatcggcatgaactcgatgaaccactacgcctacggcgcggtgttcgagtgggtgtacaagaacgtctgcggtctgaacccggtcgcggaatgcccgggtttcaagcgcgccgtgctgcgcccgcagccggataaacgcctcggcgcggcgaaggcgatggtcaacaccgccgcgggctactacgagagcggctggaaatacgacggcgacgcggttacttacacgttcaccgtgccgttcgacgcggaggccgaggtccttctcaccggcagggacggggagaccgtgcgcaagacgctgtgcgccggcacgcatacttttacgctttgatccgatagaaagggccgggaccggtgctgtttaaagcggcgctggccccggcttttctgcggttttgccggatatgtcggaatcgcgataggaaacgtcaaaatcacggtagaagctgcgctgaatttcgtgtatgctgaataaagaaagcatcgaaagctgggggaggcgttcgtgtaaaaaatactttttcacacacgatttgtgcctttgccgcgacgagcaaagcggcagtcggcttcgccgaccggcacaaaaaataaggaatggtgatttctatgaaaatcgaagaactgctgccggaaaaccggcatgaaatctgcacgacggagcggctcaaaaagcggcttctggcgctcgccgcggacatccgcgaaaagggcgtccggtttcacaacgggcggctcgttgtcacaggctacgcgtaccacgagctgtacgactgggacatgtattttgaaaacctgttcctttcgtacctcggctgcgccgatttctgccgcaataacgtcgagatgttcctcgacgagcagcacgaatccggctttatcgcgcgcacgatgggcatctgctacccgaagccgcgccaccactttaagccctttctcgcgcagacggcgctgctcggctgccggcagacgggggactgccgctggctcgacggcaaatattacgaaaagctcaaaaaatacctcgattactggttttggcactgcgacagcgataagaacggcctgtgtttctgggatggctccgaccacagcggcatggacaatcaggcgctgcgcctcggctacgacggcgtgatggagtttgagggcgtcgatttgaacgtctacctcgtgcgggagctgcgtgcgatggcgcagcttgcgctggaactcggcaaagcggaggatgcggcatcgttttcggcgcacgccaaacggcttgcggcgctgatcgacgcggtgttctgggatgaggaaacgggcttttactacgaccgcagcgaaaggaccggcgagctgaaccgcgtcaagtgtatttcgggccttctgccgctttggctcggcacgatcccggcggttcgcgccgagcggctcgtgcgcgagcatctcttgaaccccgaggaattttggctgccgtacccggccgccacatgggcgaagaacgaaaaagggtactatcaggagcgccgcggcggcgaatgcacatggatgggcgcaacgtggattcccacgaattacatggtgatgcacggcctgatgctccacggctaccgggcggaggccgaagcgcttgccgaaaaaaccttcgacatggtgctgcgggagacgaccacacgcgaatactacaacggcgaaacgggcgcggggcagggcatgtgcccgttctggggctggagcgcgctcggctacgtgatggcggccgaggccaaaaccggctacgacccggcggatccgctccgccgcgcgttcgagacgctcgacctgccgggcctcgagatcctgtaaacgaaaataccgccgcccgaccggctgctttaagcccggtcgggcggcggtgtttttatgaataatatgaccgattaacgggaatggcagcgaaaagcgtgttgtatcttctcggatgtgtttataagcagcaccgcaaagcggcttaaaatttttgtatcaccatgtatctgcttatctatgccgttaaatctcgcctttcgcaaataaattgtcctttcccatgccgcacacatagggattagaatcatatttgtggcaaaaatccaagaagtccatccgttgttttggatcgttcataatctttacaagcaattcattgggaatcgttctggcgtatgcgcccggtccggccagttttacattttttacgccgtttttcacgagcagccgctccaattcattcggcataaaggtataagttatgcaccacggcgtaccgccgcgctcatactcagcaatttcttcagcaccgcccataagcccatctgacaatagcttttcggcctgtgttttatcgaatgaaaaagcatctatcatatttgactgattcaagatgcaccattgaacccaaggatcgctgcaatccttatccagtataaattgatttttctgtacaggatttgaaagatacggcagatagcctaatcgactggatacgcttatcatgatacgctttttggcaatgcgtacaagctcggagataacatgttcctgatttggatacgtgtaagaaatcggtgcgtcaaatgacaggactaaatcaaaagcctttgcatggtaagtagacaaatcctcaagcgcacctttgacgaatgttattctgtctgaaacgcccgcttccttcgctaattcctttgccttatcgatcatgggctgagaaatatcaaaatgcgttactttgcagccctgctttgcaagtaagatggaaaatctaccgcagcccgcaccgccgtcaaaaacagtttctatgccgtcgagattggcgagcaattctttttcgatatggctcttctgaacgatatcgtcaataaatgttgtttcacgacggctttccaattcccccttatccctgagattccacatgcgttcggatattatgcggctgtattccatcttacacccctgaatttatgagagttttgtgctcttatgcagttaccatatttgcttgtttaatgcaagcggtcccaagcagaatgtccgcttagccgaggtcgattgcgcgctgggcgcgggcgttcagctccatgccggcggtgtgaccggcaaggtattcgtagtacgcctgcgcgccgatcatcgcggcgttgtcgccggtcagcgagaggtcgggcatgaagagcgtgcggcccgtgcgcgcgcattccgcctcgaggcggcggcgcaggagccggtttgccgaaacgccgcccgcgatgacgagcttctggtgaccggtttcgtcggcggcgcgcaggaagtttttcacaaggcagtcgacgaccgccttgcggtacgaggcggcgaggtcggccgtgctgatcgtctcgcccttctgctttgcgttgtgcaggatgttgatgacggcggtcttgaggcccgagaagctgaaatcgagcggcgcgccgtccaccgtggggcgcggcagcctgaaagcacggtcgtcgccggattcggcgagctggtcgaggtggatgccgccggggtagggcatgcccatcgcacgggcggccttgtcgaacgcctcgcctgccgcgtcgtcgcgcgttttgccgaggacgcgcaggtcggtgtagctcgaaacctcgatgatgtgcgaatgcccgcccgagacgacgaggcagaggaacggtggctctagcaccgggttcgtgatgtagtttgaggcgatgtgcccgcgcaggtggtgcaccgggatcagcggcagattcgccgaaagcgagagcccctttgcgaagttcacgccgacgagcagcgcgccgatcaggcccggtgcgtaggtgacggccacggcgtcgacctcattcagcgtgagaccggcctgtgcgagcgcctcgcgcacgacgccgacgatcgattcgctgtggcggcgcgaggcgatctcgggcacaacgccgccgtacagcttgtgctcctccacctgcgtcgcgatgacgctcgagagcacacggcggccgttttcgacgacggcggccgcggtttcgtcacaggagctttcaatggctaaaattttcataagcagtctttcgcctccgttgcgcgcgccgtgaaggcggagagcgctttctggtttcgtatctcgatgaatttttcggggtaggcgcgccgcatttgccggtagcggtttttcgcccgcttgctgcggccgccgtggaggatccaccttgcaaactcgaaatccagcttctcgttgcagccctcgcccatgtccggccgcgtgcggtttttaaagagccgggcgcgctttgcggcgcggtgcaggcagatgaagcggttgaagttcaaaaagacgatgcggtcggccttttcgaggcgctcctcataatagagcgtggaataattgccgtcgatgacccagctcgcgttttggtcgaggaaggcgcgcacgagcgctttctcctcctcgcgcggccgctcgacccagccgggcagccagtgcacgctgtctaaatgcagcaccggcacgccgtatgccgctccgagccgtgcggcgagcgtcgatttgccgctgccgctgtatccgattactgcgatgcgcatggaactttccctccctttaaacggtaaaaaagacaagccgtgcgtgccggtggtctggcgcgcggtttccggccggggcagcctgccctcttcccggcgtgccggcgcctgtcccctgtattgtagcacagcgcgcggcgcaaaacaagtgccggagagcgggaacagcgattgacatgccttttcccggttgctataatgaaagcaccaaatacagggggagtgatcgtattgaaaaattacattccggattatccgcgcccgcagctgatccgcaccgattgggaaaacctgaacggcgcgtgggacttcgcgttcgacgatgcggccgagggggagaaaaacggctggcaggaggcctttcagccgcagcacacgatcgaggtgccgtttacctacgagacgaagcgcagcggcgtcggcatcgaggagccgcacagcgacgtgtggtatgcgcgtacgctcgcggtgaagccgcacggcggccgcgtgctgctccatttcgagggcagtgactggcatacgcgcgtgtttgtgaacggccgcttcgccggagagcaccgcggcggctacgcgcgcttttcgtttgacatcaccgatctggtccgcaccggcgaaaaccggattgcggtgcatgtttcggacagcctgagccgcagccagccgcgcggcaagcagcgctggatcccggagaatttcgcgtgctggtatgtgcagacgaccggtatctggaaaactgtgtggctcgagtatgcgccggagagccgcatcgcgtcgctgaagctcacgccgcagcttgcggagaaggccgtgcgcgtggaggcggcggtcgaggccgcggcctgcggggacctgtacgtgctcgcgacggcgagctttgagggcgtcacggcgggccgcgcgctcgcgaaggtcacggacggccgcgccgacattctgctgcgcgtcgcgaaccgggagatcagcgagtgggatgtgcgtgcgtggacgccggaagccccgaacctctacgacctcgaggtgcagcttctccgcggcacggaggccgtggacacggtgctctcgtacttcggcatgcgcgagatccgcattcagggcaatcaggtctgcctgaacggcgcggtactctaccagcgcctgatccttgaccaaggctactggcgggattcgcacctgacgcccccgagcgaggcggcgctcctcgaggacatcgagaaggtcatggcgctcggctacaacggcgtgcgcaagcaccagaaaaccgaggacgagcgctttctctactggtgcgacgtgaagggcctgcttgtgtggagcgaattcccggcgacctatgtgttcgacgacgacgcggtggagaacgtcacgcgcgagtggacggagatcgtccgccagaattacaaccacccctcgatcatcacgtggacgccgttcaacgagagctggggcattccggatgttgcgtcggataagcgccagcagcggtttaccgaggcgatttacagcctgacaaaggcgatcgacccgatgcgcccggtggtctgcaacgacggctggcggcacaccgtctccgacatcatcaccctgcacgactacgaggcgagcggcgaaacgctctacgattactacacgaaaaaccacgcggcggttctcgaaaatgcgctgccgttcagcgtgaacggccagttctatccgtttgccgagggctacggctaccgcgggcagccgatcctcatcagtgagttcggcggaatcgcgttcaacaacggcgagagcggctggggctacggcgacaaggtcgccgacaaggcggcgtttatcgagcggttcgacgcgatcacgagcgcggtgaagcggcttgatttctgctgcggctactgctacacgcaggtcacggacgttcagcaggagatcaacggcctgatggatatggagcgcaattacaaaatcgacccggaggtcatccgggaaatcaaccagcggtaaagcgccgcgggtcggcgggtgcttcgcacagtgcggggcgcccgacgtttttttcagaattaaatttacatttgcaccgcgccgtgttaaaatattcgtatatttatgaattggagcgcaacccctatgaaaatttcagagatcctcagaacaaaggccgtgacggtttcctgcgagcttttcccgccgaagcagggcggatcgctttcgaatacgcgcgaggtcgtgcgcgagatcgccggcctgcgcccctcctttatgagcgtcacctacggcgcaggcgggtcgaattcccgcaatacgctgtccgtcgccgaggcggtgcgggaaaacggtgttccggcgcttgcgcacctgacctgcgtcgggcaggaccgcgcgtcgctgcgcgcctcaatcgagcagtttaaagagagcggcgtcgagaatatcctcgcgctgcgcggcgacatcccggcggggcagaccgcgccggaggtctttccgcatgcgagcgacctgatccgcgagatccgcgaggcgggcgacttctgcatcggcggcgcctgttatccggaggggcacccggaatcgagaaacagcgcggacgacatcgagggtgtgcgccgcaaggtcgagagcggctgcgaatttctcacgacgcagatgttcttcgacaacaacatcctctacagctacatgttccggcttctgaaaaacggcatcgacgtgccggtggccgcgggcattatgccggtcacgaacgcgaagcagatcgggcgcatcatcggcctttcaaacacagtgctgccgccgcgcttccgcgcgatcgtcgaccgctttgccgataaccccgcggcgatgcggcaggccggcatcgcctatgcaaccgagcagatcatcgacctgatcgcgaacggcgtgacgcacatccacatttacacaatgaaccggccggatatcgcggggaagatcatggaaaacctctccgagatcgtgcacagcgatgcggctgaatgagcgcgaggcgctgcgctacctcggctttcgcggccggcctgcggatgatgagacggtgcaggccgtccgggaaatcggcgcggcgctcgaaaaaagcctgcggccgaaaagcgtcagccgccgctatgcggtgcgcgtttcggaggcggctgtggagctggacggctggcacatcgagagcgtgaagctcgcgcgccatctgcgcggcgccgaggcggcttatctgttcgcggcgacgctcggcgtgcaggcggacgcgctggtgcgccggtatgcggtgcgcggtgcggcggcgagcgcggtggcggacgcggtgtgcagcgcgctgatcgaggattactgcgacgagatgcaggcgcagcttgcggcggcggaagcggaaggcggcctgtacctgcgtccgcgcttttccccgggttacggggattttgcgctcgagagccagcgggagatcttttcgaggctcgcctgcgaaaagcgcatcggcctcacgctgaccgacacgctgatgatggtaccgtttaagtccgtcacggcggtgatcggcgtcaccggcacgccggcgtgcgcctacaataagtgcgccgcctgcacgaataccgcgtgcgcattccgcacggaagcgtgacagaaaaggaatggtgaaatatgtatccagttatagaacggttcggaaaagacgccgtgatttttgacggtggtatgggcacgcttctgcaggcgcacggccttaggggcggcgcgctgccggagctgtggaacctcgagcgccgcgaggtcatcctcggcatccaaagggaatacgccgctgcgggctgcgacattctgagcacgaacaccttcggcgcgaaccggctgaagctccggaaaacggggtacacggtcgggcaggtcgtcggcgcggcgtgcgagatcgcgcgcgaggcttctgcgggccgggcggcggtcgcgctcgacatcggcccctcgggcaagctgcttgagccctgcggcgacctcagcttcgacgacgcctacgcgctctttcaggagatggtcgtcgcggggcgcgataaggcggatctcgtgctgatcgagacgatgagcgacacgtatgaggtcaaggccgctctgcttgccgtgaaggaaaactgcgatctgccggtcgtcgtgacgtataccttcgattcgaccggcaaacttttgaccggcggcagcatcgaggccgccgtggcgctggctgagagcctcggcgccgatgcggtcggcatgaactgcagcctcgggccggagcagatggcggactttgtgccgcgcctgctcgccgcaacgcatctgccggtctgcgttacgccgaacgccggcctgccggttgccgtgaacggcgagacgtcgtatcccgtcggcccggaggcgtttctcggctgggcgcagcgctttgccggggagggcgtcgctctgctcggcggctgctgcggcaccacgcccgcgcatatgcgctgcgtttccgacgcgctgcgcggcaggccggtgccagcgcgcagcgtgccggcgcgcacggtcgtctcgtcctacacaaaaaccgccgaattcggcgcgcgcccgcttttgatcggcgagcggatcaacccgaccggcaagccgcggctgaaggaggccatacgcgccggcgatttcgaatacatctgccgcgagggcattgcgcaggcggagagcggcgccgatattctcgacgtgaacgtcggcctgccgggtattgacgagccggccgtcatggcgcaggccatcgcggcactgcagagcgtgaccgacacgccgctgcagatcgacacctcgaacaccgaggccatggcgcgcgcgctgcggctctacaacggcaagccgctcgtcaactcggtgaacggcaaggccgaatcgctgcacacggtgctgccgcttgtcaaaaagtacggtgcggcggtcgtcgcgctgacgctcgacgaggacggcattcccgacaccgccgccgggcgcgtgcggatcgcggagaagatcctccgcaccgcggaggcatacggcatccggcgctgtgatatcgtcgtcgatacgctcgcgatgaccgtgagcaccggcgcggacaacgcgaaaatcacgctcgacgcgatcggggagatccgccgccggttcggcgtgcacaccgtcctcggcgtctcgaatatttcgttcggcctgccgcgccgcgagctgatcacaagcacgttctttgcgatggcgatgcagcgcggcctgagcgcgggcatcgtgaacccgctcagcggcgagctgatgaaggcctaccgcgcgtactgcgcgctgaccggcctcgatgacggctgcaaggcgtacatcgaggcgtatgcgaatacggcggccgcgccggacgtcccggcgggcggcgcggcgcaggccgcggcccccgcctcggaaatgacgctgcaccgtgcgatcgtcaaggggctgcgcgagcaggcgggcagcctgaccgaggcggcgctcaaaaccacgccgccgcttgagatcatcaacggcgcgctgatcccggcgctcgacgaggtcggcaagggctttgaaaagggcacggtgttcctgccgcagctcttgatgagcgctgacgcggcgaaggaggccttcgaccgcatcaagacggagcttaaaagccggggtgtggaggagaagaaaaagggccgcatcttgctcgcgaccgtcaagggcgacatccacgacatcgggaaaaacattgtgaaggtcctgctcgaaaactacggcttcgaggtcgtcgatctcggcaaggacgtgccgccggaggcggtcgtgcaggcggcggtggaggggaacatccggctcgtcggcctttcggcgctgatgacgacgaccgtcgtccacatggaggagacgatccgcgcgctgcgcgccgcgcacgactgcaagatcatggtcggcggcgcggtgctgaacgccgaatacgccgcgtcgatcggcgccgacttctactcgaaggacgcgatgggctcggtccgctatgcggaatcggtttttgcaaaggaggtgtgacggatgggcgttgtaccggaaaagtgcccctgctgcgggagcaccagcatcggcgtcggctaccagattggcggcgggcggctgtatgtggatgcctacgcttaccacagcagcacggcgggctccgatgtggagacgttcctctgccgggactgcggcagcattctgtacgccagggcgctgcggcccgaaattttccagagcgccggcgatgcgcaccgcgaggcgctgcgtgcgtatatggaggagaacggattccttctgctcaacgcccatgcgacgctgccttccgcagacgcgctcggctacagcatggagacgctcgtgcagctcgcggagcgccgcgaggcagtgtacacgaaggcgctggccggccgcgcggtgtacctgtcgccgcgggcgttccggcttctgtgccgtgtgaagccgcagaagccgcgcaccgatgcggcgcggcaggtgctcgaggcgctgcgcgcgtatgacggcgcggacaaggaaacgctctgcgaagcggttcagatggaaaagaaaaccttttcaaaggcgttcgatttcctgcttgaaaacctgtacgtcaccgtgtgcgcgggcaggcggctgacgccgagctggtacgcgtatatctactgcacccgggagcagttctgccggggcctgccggagctgcacgtttcaggcgatcccaaggccgcgctttgggcggtcgtcggaaaaacgatggacgaaaagagctttgcgcagctctgccggtgagcgcgggggcaattttggcaaaacggaggttttcgatatgattgagatccgaaatgagacggaggcggattacgcagcggtggaaagcatcacccggcgcgccttctacaatatctatatgcccggctgtacggagcactatctggtgcgcgtcatgcggagccacgcggattttatccgggcgctcgacttcgtgctcgagctggacggccgtgtgatcggcaatgtcatgtacacaaaggcgtggctgacggatgaaagcggcgcggaaaaggagatctgcaccttcgggccggtcagtattctgccggaataccagcgcaagggctatggaaagctgctgctcgagcattcattctgtgcggctgcggcgctcgggtacgaggccattgtcattttcggcagcccggagaattacgtaggccgcggctttcagagctgcaagaagttcaacgtctgcacgggagacggccggtacccggcggcgatgctcgtgaaagcgctgaaggccggcgcgcttgacggcagacggtggttctaccgcggcagccccgcgatgaacgtggacgaagcggcggcgcaggcgtacgacgacacgctcgaaaggctggagaagaagtggctgccgagtcaggaggaattctatattctgagccgctcttttgtagagtgaggcgcgccgcccaaaaggccgcgcaaaaaataaagggagacggcagcggctttcgccgaatgcagtctcctttttttgccgcctatttatcttgtgttgcggtgcagcacgcaggcctcttccggtttcggcggctcaaaaagcgattcgagcttttcgagcaggccgctgtctacggcgtaatcggtcgtttctccggcggcgacggccgcgttgcgcgacgcaatgttgcgccgccagtcgctgtcggaaatctccacataatgccactcgaaggggatgccggcgtcccggtaatgggcggaggccgccttgcgctcggcgcgcgtccaaaagccccagtccagcaccacggggcagccggcccgcgcgatctccgccgcctttttatgcaggtagcgtttgatgtctgcggagacagcgtcgtgccgctcgccgaaatcgtggtggaacaggtcgttttcgatctcatcgcaggagagccgaaccgcgcttttctccgcctgaagctgcgcggcgtagcggctcttgccgctgcagattttcccgcagatcaggtagacggcgcctgccccgcgctcacgcattttcgggcgcatggctgtaatcaaagccgcaggcggcaagccattcctttgccatcagcgccgcgccgatctggttcgggtgcacgcggtcccacgcgatgaaagaggaatgcttgtgctggaggaagcggtcgtacatcgcctgaaaatcgacgaagatgcagccgtattccgcggcgaggcgcgcgcagatgtccacgtattcctgcatgcgggcgcgcatgaaatcggtgcggttcggctccatatagtagggcgtcgcgaggatcacgccctttgcgatggccttggcggattcgatcatgctgcgcaggttctgctcgtactccgcgggggaaacagcctcgtcccagatggcgggcgaatcgaactggcgccacacgtcgttgatgccgatgcagatcgagacccactgcgggttgaggtcgagtacgtcgcgctggtagcgctcgagaagcatccgcgaggtattgccgccgatgccggaattcgtaaagcggatgctgcgctccgggtaaactgcgccgacaaggctctcgatcacgcgcgggtagccgtggcccatgttgtcgaaaaggccctcgccgaccggctgcgcgctgcccatatccgtgacggaatcgcccgcaaagacgacgcggtccatattctcaaaaatcattttatcgctctcctaagcccgcttctgcggttatttattccgattatagccgctttccgcgcagaaaacaagggggaagcgtcaaaatataacggctgtgcgcgtgctgaaagggcgtgtgcgggggataagccgacgcgacggcatacgcaaaaagccggccccgcgcaggggaccggcttcggcgtgtgtttttattctctgccgttccagcagtaggtgcacaggcactcgggctctatgccgacggattcgacgagatcgtcgagccggtggtagcgcagcgaggtgaaatgctgcagctcgcagatgcggtccaccattttctgatatttctcgttgtccgggtcggcgtattcgcagagcgtgtcataatccgggtcgcagccctcgagctcgcggatcacgcggcgcgtgataagctccatttccgaggaggagcgcgagaaattcaggtatttgcagccgaagagcagcggcgggcaggcggggcggacatgcacctctttggcgccgctcgcgtacaggaattcggtcgtctcgcgcagctgggtgccgcgcacgatcgagtcgtcgatcagaagcaggctcttgccctcgatgaggtcgtgcaccgggatcagcttcattttagcgatgaggttgcgcttgctctggtgcgtcggcataaaggagcgcggccaggtgggcgtgtacttgatgaacgggcgcgaataggggatgccggattcatttgcgtagccgatcgcgtgcgcgacgccggaatccggaatgccggcgaccgtatcggggcggatgttgtcgcccttgtcgcgctttgcgagcaggctgccgcagctgtagcgcattttttcgacgctgatgccctcgtaggaggaggacggatagccgtaatagacccacaggaaggtgcagatcttcatctttttgcccggggcggcgagcgtgcggacgttttcggtatcgaacacgacgatctcacccggcccgagctcgcggtaatcctgatacccgaggttgaggtaggcgaagcattcgaagctcgcgcagaagccgtccgtctttttgccgaggacgaccggcgtgcggccgagcttatcgcgcgcggcgtagatgcccttcggcgtgaggatcagcatggagagcgaaccgtccacaatttcctgcgcgtagcggataccctcgatgaagttttccttctggttgatgatggcggcgacaagctccgtcgggttgatttcgccgttctgcatctcgaagaaatgcgtgctgcggctgatgaccttttcgaggatctcctcggtgttgttgatcttgccgaccgtcgttatggcgaaggtgccgtgctgcgagcgcaccagaatcggctgtgcctcgtagtcggagatgcagccgatgcccatcgtgccgtgcatggtctgtgattccgaggtgaactttgtccggaacggcgcgttctcgatgttgtggatcgccttgtcaaagccggtttccgggttgtagaccgccatgcccgcccggcgcgtgccgaggtgggagtggtaatccacgccgaagaacaggtcgaaaacgcagtcgtctctggatgtagcgccaaaaaatccgcccatgatgatacttcctttgctgtaagagttaaaaagacagtattattatagcaaaaagcggggaaaagggaaagggcaaacaaagagaaaaggccgccggaaaattcggcggcctttgtgaaggcttacaaaattgaattttcgttttcgcccgccggcaggtttttctgcccggacatgtgcacgggcaggatctcgtgcctgcggcttgtgctggagatgtgctccttgtcgtattcggtgctgaagccgacgacgtacatgatgagcaggctcgtctgcggccagagcatcgtgatgtcgagcaggccgtgcagcagcacgcagacgatgaccgaaacggtcagcgcgtagcgctggtggcacttgttctgccggtgcagccggatgatcttgctgatgttgattgagaagtacccgagcagcacggccgtgcctgcgatgccgaaatccatcagcacctcgagcagcaggttgtgcgagtgctttgcgatgtcataggcgtcgtacaggtcgcggatgcgcacgtatgtattgtagccgcggccgaaaaccggggcgtcgagaatgctgccgatcgcgccgccccagatgtcgaggcgcttagcgatgtcctttgtcagttcgttgacgcgcggcaggaagtgcagcgtatcgtcaaagagcagcgccgcggtcgcaagggcaaacagggcggcgaggtaggcgatgccccactttttcttgccgcattggaacagcatgaccggacatacgatcaaaagcacgacgtaggttgtgcggcattccgtgagctcgagcgcaagcagattgagcgggatcagcgccgcgtaagcgatctgcatgcggcggctttcgctcttcacgatattgtagatgcagaagaggatgacaagggaaatgtaaaatgcgtagtagttcggattcgtaaaaacagagctgtagcgcgcgccgtaggcccagcgcatgccgagcccgcgctgaatcagcgcaatcaggagacagtaggggctcataaagcagacgaaggagaggatgatccgaaacatccgctgcgtcatcgtgtaggtgacgaagatcatcgcgcagaaggcgaaaatcatgaataccccgagcagaatatccaccaccgttccgcctgaacatacggtgacgatgatggagaggacccagaaggccgaaagaaagagcacatcctgcttgcgccgcaaaaaaataaagccctgctttgtggcaaaaatatagacgggaagaaaaaccagcgcggtgacctccacataaaccgtcaaaaagatcgaggcggtgagcgccatcagaaccttttcgttcggagtcagtgcgccgaatctctgccgcagctccctgaagcgttgcagaacgattcacctccagaaaaatatagggcagcaccgcacaattgctgaggcaagcgctgtcgaatcacccatcaggcaggaaaccataggcttcccggcgcatttcttcgcgagagcgcacaacttcaagccgccaggcagggcctgtcagccagaagcagattcgccaatgcgaacatgatattgaatttggctcgctgcttttcgagccctcggtatcgcgtttttcgaaattgcagctgtttcttgacgacaccgaatacgtgctctacttttgcccgaacagaagactttgcgtgttctgctttctttgcggcatactggccgctcttgctcagcttttttaattgagatggacgtcggttaattttgtatttgatcttgcgtccggatttgttccgaacgatcgcgtcctcacggttcccggctccaagatagccactgtcgccgtaaacgacatcttcctcaccggtcagcagggatgaagtctgcgtcacatcatggacattagctggtgtcgcctccactgtgtgtaccagtccgctgtccttatccaccccaacatgggctttatagccaaagtgccatgtgttgcccttcttgacctgatgtgcatccggatcccgctttttctccttgttcttggtggaagacggcgcggaaataatggtggaatctacgatcgttccctttttcaggataaggccctgttcagtgagcgcggtaacaacttgtgcaaacagtttctcctgcagtccattcttcaccagcaggttccgaaagcggccaatggtatctccgttcggcacctgattgctggaatcaacgccgcagaaatctgaaaatgcccggctgtcgattgcctccgccgctgttgcttcatcactcaggtcatacagattttgcagcagatacaaccgcagcatggtctccagtggatagggtttattgccgcgctctcctttgtaatagcacggctggatcagcgtaagccattccttccacgggacgatccgctcgatctgggctagaaattctttcttctttgtccgtacctgcgccaactcatcactaagcgcagacattgtcatctgtttatccatggtcttattatatcacttctggcagtatcgcgcctacttttctgtgcggtattgccatagaacattgtataccgagaaaatgaacgtggtatgaaatttccatggccagcggtaaacccgatcgatgtcccattattttaacaggaattttatgcggatacaatgctttttgcaaaaaatttgcaggaagatcctcaaaaggcccggtacagccgctgcatccgcaaaaaaattcctttttatcggttgacagcgggggactttgttgctataatagtaaagctgtatgactcattagctcagttggcagagcacttgacttttaatcaaggtgtccggagttcgaatctccgatgggtcaccaagcgcgtcaggaacgcgctttacgctggtgtagctcagttggtagagcagctgatttgtaatcagcaggtcaggggttcgagtccgttcaccagctccacagataaagaagtggaaggcggctgcctttcgtcttttatacatccaagagtttggaaacggactcaaaccctgagagggttttgtcatttggaaaatctgccggtggcagattttcagacaaaaacggcgcggctgtgccgcgagccgtggagacgcgtgaagcgcggcttcgtccgttcaccagctccataaatggaggagttcccgagtggccaaagggggcagactgtaaatctgttgcgtctcgcttcggtggttcgaatccaccctcctccaccaagaaagcgactgatttatcagtcgcttttttaatgaaatttgtccttcgaacaagtgaaatagcttcgctatgaaatatttgcttcgcaaatgtgttgcggcacataggggggatttccctttctgcgccggcagaaaatttcatagtccgtcaggacttttttcattcgtttcgatcgcctccgccaataccgctgagggagtcaaaggataatcttttggcggacgattgccgaatgtggatgaagcagaacgcatcgttgacgttctggagggggcgtctaaagtgtccacccctgaaaatctccgaatgcagtctgtacgccggagatttttgggacagtgattgcagcgtgaaaaatggattatacaaggagaacagcagaattatggatatgaaaaaatggtttaaagaagcgcagtacggcatgatggtgcactgggggttatactcccttttggcaggcgaatggcgcggccgtttctgcggcccgtacgcggagtggattcaggcgaaccttgcgattccgaacgccgaatacggacagctcgccaaggcgttcaatccggtctgctttgacgcggacgcgtgggtgcgtctcgccaaggcgtgcggcatgcagtattttgtggtgaccagcaagcaccacgacggctttgccatgttccattcgaaggtggaccgctataacgtggtggacgcaacgccgttcggccgcgacgtgatggccgagctcggcgaggcctgctacaagcacggcttgaagctcggcatgtactactcgcaggacctcgactggcacgaggagcacggcggcggatacctctccgaccccgcgacggcgcagggcgtgacgtgggaaaacagctgggatttcccggataaatcgaaaaagaacttcgacatctgctttgaaaacaagatctacccgcaggtggaggagatcctgcgcaattacggtgagctctgcctgatctggttcgatatgccgatgacgctgcgcgaggatcagagccggcgcatttatgaggcggtgaagcggtatcagcccgagtgcctcatcaattcgcggctcggcaacggcgcctacgactatgtttctttgggggacaacgagattccgtcggagattccggccggcgacgcggtgcgcacggcggcgatgaacgagatcgacggcttcaagccctcgccctacggcctgtacgaatctgcggcgaccatgaacaattcgtggggctactgcgcgtgggaccacgactggaagagcgcggagacgattgcggcgaaccgcgagaagctgcgccgcctcggcatcaactacctcttgaacgtcggccccgacgggctcgggcgcatcccggcaaagagcgagcagatcctgcgccgtgcggccgaactgtgccgggcgtaaaacagaattacggacaagctgcgccgcgcgccgatgggctgcggcggcagagaaaaaaggatgccggccccggagggggagcggcatccttttttgcgtcaaatcgggcgtgcagcgcgcttttgcggaacgaaatttcgggctcccgcagaggaggctgcggggcgggctgtgcggccggcagattttccaagtgcgggcggttcggccgttcaggcgggcagggtgtcggtctgaacgccgcagtggcgctgccggaaggtgcggggcgtgagttgcgtgctctttttaaaaacggtggaaaaataggtggaggaaaagaagccgcaggcctccgcgatctcgtcaattttcaggtcggttgtgagcagcaggcggcgcgccttgacgagccgcctggcgttgacgtattcggtgaagctcagcccgacctgctccttgaacatctgcgacaggtacgcccggctgatatagacgctctgcgacacggcggagagcgtgagcggctcgttcagatgcgcgtcgatgtaccggcaggcctgctccacatgggcggagcgcggccggttggcgcagatcagcttcgcataggattcgaggattttctcgccggccagaagaaagcggggctcgtcgtcgaacaggtgggagacggccttgttctcaaagcagcactgcgcgagggagatgtcccaagtgaaaaggatgaaattgtacaggctccggttcagggagttcagaaaaatgcagcgcagctcgcagatattcccgcaggcggagagctgccgcagggcgctggcgcgcctgtagaggatctccgaggcggcgctttccccgcttttgacgagcgcttcgcagatggctttgtggttgtacaataaatccagacaccggctgttcatgcaggcgggcatattgttgtccatagaggctcctttccgtggtacgatccggtaaaatgagggaaaaaagaaagatttttaaggttatcccgaaggattctaatgtttccgcgggaaatgtgtgttataatccaaatcgcggttagtttagtctaactgtccctttaaggctattatactgctgggccaaagggttgtcaatagacaaggaaaggagaagcagatgcgcaagattgcaatttacggcaagggcggtatcggaaaatcgacgacgacctccaatgtatcggccgctttggcgcagatgggctataaggtgatgcagatcggctgcgaccccaaggcggactccacaaagaacctgatggggggctgccgggtgccgacggttttggaccagatccgcgcgcggggcgatgaactcaagctggaggacatcgttttcgagggctaccacggcgttctgtgcgtggaatccggcggccccacgccgggggtgggctgcgccgggcgcggcatcatcacggcctttgaaaagctcgaggagctgcgggcctttgagatttaccggccggacgtggtgctctacgacgtgcttggcgacgtggtgtgcggcggctttgcgatgccgatccgcggcggctatgcggaggacgtgtacatcgtgtcctcaggcgagatgatgagcctgtatgcggcgaacaacatcgcctcggcgatccgaaatttcggcgcccggggctacgcgaagctgaaggggctgatcctcaattccaagaacctcgagaacgaggcggagatcgtggaaaaggcctgcgcggagatcggcacagggatcgtggagatcatcccgcggtgcgcggatatccagttcgcggaaaacaagggctgcacggtgttcgaggcgctcgaggcatccgaaatgaaggcgccgtacagcaggctggcggcaatgatggtagaaagctgaaccgtattgtacggagaaatggaggaaattcaaaatgatgagaagaagaattttggcggctgcttgcagctgcatgctgatttttgcagggtttgccgggtgcgcggagcaggcggcagattcgtcctcgagcacatcgagcgcggcgtcgcaggcggaggcgtccgtgtcgtcgtcggaggcagagccctccgcgcaggcggccggcacggagccggaggcggcgcagggcgtggttctgccgtattcggagacggcgcaggagcagtacggcctgccggcggagctccggcttgaaacgacgccggagcgcattatcgtgatgacgctcgggccgacggagatcctgcacgagctgggcgtggagctgctcgcggtgccggatacgatcgacgagagtcaagcgtggacgcaggatctggaagcggagcggctgcctttctcggcgaacagcatggacaccgagggcatcatcgcgatggagccggatctgattatcatgtccgccggcaagcgcgagacgtacggcaccttctttgaggagaaggatatcccggtctactacaccgtgacctcctcgatggacaacggcgcgatcgaagacacgaaggcgcaggtcgagctttacggcagcggcttcgggcgcacggaggagatgaacgcgatcctcgcgcgcttcgacgagctggaggcctccattgaggcgtggaaaacggagaacgccgcgctgcagggtcaggagatgatgattttgctcgactgcccgtttacctacacgaacggcagtgatacgacgctcgggcagatcatggcgtcgcttgggctcgtcaatatggcggattccatcgagggactcgagagcgtgatgggcaccggaaccctgcagatcagcagcgaggtgatcgtggagcagaacccgccgatgatcattgcgcagccgaccggcgcgggtgccggcatgatctacaccaccgaggatttcaaggcggacctcgaaaaggagtacgcggagaatgaagcggtgtggggcggcgttgacgccgtcaaaaaccagaagatcctgtatctcggcacggacgattatcccggcacgacagggctcggcattttcaagtgctacgaatacctgatggaaaaccttccgaatttgtaatggggcggatccatggtaaaggctgaaaagaaagtcgggatgttccggatcgggctggtgtttgtggtcagcctctgcatcctcgcggtgctctctgtcttggcgctgcgcatcggcagcgtttcctacaccacggccgagattctcgaatcgatcttcgacccctccagcacgatccacaccatcatcgtcaacctccgccttccgcgggtgctccttgcggccatcgtcggcatgtgccttgcggcggcgggaacgctgctgcaggccgtgatgcagaacccgctggcggacccgggcatcatcggcgtatcctcgggcgcaagcgtggccgcgacggttgtgttcctcgtggtgccctcgtggacgagctcgctgccggttttggcattcctcggggcggcggccgcctgcctgattatctacctgatggcgtggaagcgcggggtggagcccacacgcatcattctcgcgggcaccgcggtcaacgcgatgctcggcgcggtctcctcgtttctgacgctgctcaacgcggataacctgcagggcgtgctttcttggatgaacggcagcatggcggcggtttcttgggcggatgtgcgccagctcggtatatacgggggcatcggcctcgtgctggcgcttttgtgcatcaagccggcgaacgccctgcagctcggcgacgacatggcgaagaacctcggtctgcgcgtgaacggcatgcgcattttgctctccggcgtcggcgcgtttctggcggcggccacggtatccgttgtgggcatgatcggctttgtggggctcgtggtgccgcatatcacaaggctgcttgtgggctcgaaccatcgggtgatgctgccgaccggcatggtgctcggcgcctgcgtggtgctgtttgccgacacgcttgggcgcacgatcgcggcgccgatggagatcccgctcggcatcatcatggcgatactgggcggcccgttcttcctcttcctgctgcggagagggagaaaaaagtgaacggcacggaaggaggcgccgcatggacggcaaggaaatcatagtaaaatcgctcgaggtcgggtacgacgagcacatcatcgtgcgggggatggacctgcgcctgaagcccggcggggtgacgacgctgatcggcccgaacgggtgcggaaaatccacgctgctgaaggcgatgacgcggattttgaagtgccgcggcggctcgattttgctcgagggcaaggagatccgcaagatgccgacgaaggagctggcgcagaagatctcgattctttcccagcaccagatcacgccggacgacatcaccgtgcaggaccttgtctcctacgggcgcatgccctaccagaaatggtatcagggcgaatcgcaggaggatgtcgagatcgtccggtgggcgatggaggccgcctcggtggcgcacatggcggaccgcaaagtgcgcagcctttccggcggcgagcggcagcgcgcatggatcgccacggcgctggcacagaagccccgctttttgttcctcgatgagccgacgacctatctggacatcgcgcatcagatggagatcatgcagctgatccaaacgctcaaggcgcagctcgacatctcgatcatcatggtgctgcacgacatcgggcaggccatggaggtcagcgatcaggtcgttgtgatgaaggacgggcgaaaggtcgcgtccggcgacccgcagacggtgatcaccgaagcgctgatcgagcaggtctacgccgtgaagtgccggcttgtcccgctgccggggcggcgctgcccgacgattatttatgaaagcttgaccggcagggaggcctctgccgggccgggaggtaactatgcaggataaaacagttttgagccatgtgaaaaggctttccgcggtgaacgggcgcaaggacatcatgcctctttcatgggtcacatacccgggaacgcactgcccgctgttcggcgcggcgctcacggtgcgccagctgaaaaacgcggtgatgctggtgatcggcacggaggagtgcacctattacaccaagagcctttcgctcgtctacggggagttcggcggtctggacggccgctgcctctccttcgtaatggacaagcacgacgtgacgttcggctgcaaggagaagctggagcgggcggcgcaggagctggtcgaggaatacgcgcccgaggcggtgttcctcgtgacgacctgcgtgcccgaaatgacgggcgaggacatcgattccgccgcggaaagcctgtggaagacccacggcattccgtttctcccggtgcacaccgatcatttccgctgcgacgggcacctctccggcatccaaaacgtctgggccgcctgtgcggcgctgatggagccgagcgcgccggtgaacggcgtgaacctgctcggaaaaaaggccgggcgcagcgagctcgcgcgcctcttagaggcggccggcgtcgccgtgcaccgcacgctgccctccgactgcagcctcgaggagatcaaaagcgcgccggcggcaagactgaacatcgtgtgcagcaagcaggggcttctgctcgccaaggagatgcagcggtgcttcggcacgccgtgggtttccttttacgaccgctgccgcccggcggagatcgaggagggctacggcatgctgttcgagctgctcggaaaacccatgccggcggaggtcgccgaaaaagcgcagcggctgcgggagaagctggcgctcgccgaagaaaatctgcgcggcggcacgttcatcttgggcaactcgtcggtggagcccttcgtgctggcttcctttttcgcggagctcggcatggaaccgctgctgattcaggccaaggagttcgaggcgtccgacgccgcccataaggaaattatcctcgggcaggggatggacccctacgtctcccagtcggcgaatctcgccgcgatggcgggaatctacggcctgctcaagccgtgcctgtatctggggccggccgagcgcgatatccttctgcagcaccggatcgtcgggatcgggctgccgaaggccgggcagatgctggggttcgagcttgcggagcacatgctcgactgcttcacagcgggaatggaacgccgcagacagataaaggagaatgagatatgagcttgtgcaggcattttccggttccgtcggaccggatggggatcatctggagcgtgctcccgattcgggactgcgccgtcatcgaatacggcccggcgggaacgacgcactacggtgcggaaatcatcatggattacggcatagagatccataagaacttcttctgcacgcatgtggatgagaacgacatcgttatgggcgacatctcccggctggagcaggcgattctcgaggtggacgcaagctgccgcccaaagtgcatttttgtggtcggctcgtccttgacctccgtgatcggcgcggacatccgcgggctgtgccgcatgctgcaggggcaggtggaaagcctgctggtgccctttgagcacggcgggtttagaggcgactacagcctcggcatcgccgatgcgctcgaggccgcggcggaggccatcgcttgcccgccggcggagaaaaagccgggcgccttcaacgtgatcggcgcgtgttacgacgctttccgcgtcggctccgatacggcggagatctgccggctgatgaaggctgcgttcggcatggagccagcctgcattctgccgtatgcgtgcggctatgacgatgtgcggcggtgcacggaagcggagatctcgctcgtgctgcggcaggaggggcttcgcgccgcggcggtcatcgagaaaaagggcggcggcgcgccggtctatggggcgccctacggctacgagggcacaaaggcgtggatcgaccgggtggcagaggcgctcggccgcgcgccggaccctgcgtttcagagtgcgctcgaccaaaagctcgtgtgggcgcggggcaaggagagcgagctgcgctgctcggggctgccgatgcgggcggtcatcgagggaaacgagatgcaggcggccggtatcggccggttcctgcacgatgagctcggcatggaggtgcagggccttttgacccacagcgcaaagggcatggaaaacgtgccggcttggtgcagcttcctgccggaaaaggaaaagctcgacctcctgcgcggcagcaccggcacgctggtgctcggcagcgacgaaacgctttcacaggtaccggcgggaaacacgctggtgcagatcggcttccccgcaagggaaaccatcgtggtggcggagcatctgccgatcatggggctgcgcggcgcggattggctgatggaatccatcctcagctattacaataagcgagtcgtatcgatgatgatgcagtaggcgcggaacgcttcccgccggccgggaaaaatcagcggttgccggcgcaggcagcttgtggtagaataatatacagcaggcaatcggatttttgcgccgtcaggcatcgaggggaatatgaaatcgaaatgtattcgcacgcttgccgccgttctgctggccgccttgattttagcggccgctgcggcggcgctcgtgtataacggagtaattctgctcaaccggccgtctaaggcggcgtatcccgtccgcggggtagacgtttcctcctatcagggcgatatagactgggcggtcctttccgcgcagggcgttgatttcgcgtttatcaaggccaccgagggaagcagtatggtggacccctgctttgcgtataatttttccgaggcgcagcagtgcggcattgccgtcggggcataccattttttcagcttcgatagtgcagggcgtacgcaggcggaaaattatatcgaggcggtagagccctttgcgggcatgctgccgccggtgatcgacctcgaattttatggggataaggcatggaacccgccggagcgggaggctgtagagcgcgagctgggcgcgatgctctcggcgctcgaggcgtattataggctgaagccggtgatctacgccaccgaaagcgcatatgcccgatacctctcgggcggatatgcggaatacgatgtctggattcggaacgtgtggacgcagccgcggctggacgacggccgggaatggaccttttggcagtatgcggaccgggaaaggcttgcgggctacgagggcgaggagcggttcatcgacgtcaatgtgtttcgcggcagccgggcggaatttcagcagtacgcgcggttttcgcagcaggatcagcaggaataaaatagaattgcgagccccagatacaaccgtgtatccggggctcgctttatcggtgtgcgcgcagtgccgtgcccgacgggcagggtgcgcggctggccgcccagcgtttctttttggagacgacggcagggggagttattggccggccttcaagacggcgtccatacgccggaacagcgctgcgagaaaggcgaacggatgcgggcagccgcggtacaggaaaagcaggagcgtgacggtgctgcagcaggatcgcccgctctccagatcggcgtaggcgcgcggactcatctcgagcagtgccgccatctcctcctgcgtgcgccctgcctgatccctcgcccgcagcagctcacagcggaaataattcttgaattcggaataaattttgtctctcatggaaagcaccttcctttacagaatttgtcaaaattctacaaggaatctgcgccttatactacggagaattcaatggaaaatactcatgccgcaaaagaaaagcatctgtctccgcacaacgcggaaaacagatgctgaaatggcataaatgatccaaaacgagagagaggagaaaaggccgcggactgtgcattcctgcgcgttggctgcgttccggaaggcgccgcgcgacgaaagccggggcaaaaaaggcacggttccgcatgctgataatgtgatactttataaaggccggtgaaaatggatataaagcctttatgattcggaaaaacgaactttattttttgtgggacgcgggtttacgcatccgcggcaagggcgagaaaggcgcggaaaatggcctcgccgtccaccgtatccgggcggcggtgctgaaagcccatacgctcggggtggaactgcacgccgatgacacggccgttttcgtggatgatcccctcgttcacgccgtcggggctgacgcaggaggcgagcagtccccggccgagccggcctgccgcctgatggtgcgcgctgttcacggaaaacgcatcgccgtacagcgcctgcaggaacgggtggcaggcgcggacggcgtgcacgttatcgcccgcctcaccgcggtcgacgtggcgcgccggctcggcaacgtcctgaatcagatcgccgccgaacgcgacgttcagcacctgatgcccgcggcagatgccgaggaccggccggccgctcgagaaaaaacggcgcaccagcgcgagctcatcgcggtcgcggctgtcgtcgatgccgcggcttgccgtgttcgcctgcccgtagagggcgggattcaggtccgcgccgcccggcaggagcagcgcgccgcagcgctcggcgtccctgagatccatagagagcaccggctgcgcgccgcaggcagcgagcgcggccgtgtagtttgcgaaatcgccgcggtttccgcggataaaaacagttttcatgtgtggctatccctttctggaagatgtgaaatcggcgcgcagaccggcggcagacggtacgcgcgggtgctgtccgcaaaaaaaacagaaaaaattcagttttatgtatggaatagtatagcaccgatgtggtatactttacaagatcatccggcgcggcacggtctcgtgcgctgccgcgcggagaacttaagcataagcgccggtatggaaggatgggcattcaggtggagccaaaatggaaagagataatactgcgggaaaaagaaaaggcggcgggcacagggggcagaagccggaaaaacgggatttacgccgtcgtgcagcgccggcaggccgtgaccggcctgtcggttgcattcggcattttgatcgcgctgggcatcacggccatgctcgcggcgccgcacatgagcgacgcgccgattcaggccgccgcgccggtggcgcaggaaacggcggcgccgtccgaggcctccgccgtgccgtcggcagcgcccgcgccggcggtcatcgacgagaattacgtgcagctcgaggactgggcgcttgtgctcgtcaacgacactgtcgcgctgccggcggactttgaggttgcgccgacgctttacggcagcgagcaggtcaattccaagatctattcggcactgagcgatatgctcgccgccgccgcggccgatggcattcaggacatctgggtggcctcggcctaccgcagcgtggaggatcaggagagcattctggaaagtgccatccagaaccgtatgcgcgattacggcatgacgcgcgaggaggcggagcagaacgcgcttttgacaattcaggagccggggcacagcgagcaccacacgggcctcgccgtggacttcaacaacgtggcgagcgattttgaggaaacggacgcctacgcgtggctgatggaaaacgcggaaaactacggctttgtcaagcgctatccggcggacaaggaggacatcaccggcatcgactacgagtgctggcacttccgctacgtggggcgcgacaacgccatcgcgatgaacgacctcaacatgtgcctcgaggaatatgtgctctacctgaagaatcaggcgtaaagacaggggaaaggcggggaaaacgcgcttttccccgatttttttattgcaaattttgcgcggcggttatataataaactctatatattggtattctgacaggattggtgatttttatggtacgcacacgctttgcgccgagcccgaccggcttcatgcacgtcggcaacctcagaacggcgctgtacgagtatctcgtcgcgaaatcgcagggcggcacctttgtgctgcgcatcgaggatacggaccaagagcgctacgtggagggcgcgaccgacgtgatctaccgcacgctgcagcaggtgggcctcaagcacgacgagggtccggatgtcggcggcgcatacggcccgtatatccaaagcgagcgcaaggcgctctataagccctacgcggagcagctcgtcagagagggcaaggcgtactactgcttctgcacgaaggagcgcctcgaatcgatccacacggcggattctttcggcggctacgaccgccactgccgcgacctgccgcaggaggaagtgcagcgcctgctcgacgcaggcacgccgcacgtcatccgccagaaaatgccgctcgacggcgcgacctcgtttgaggatgcggtgtacggcacgatcacgatcgagaataaggagatcgaggaccagatcctgctgaagtcggacggctacccgacgtacaattttgcaaatgtcatcgacgaccacctgatgcacatcacgcacgtcgtgcgcggctgcgagtatctgacctccacgccgaagtacaatttgctctacgaggcgttcggctgggagaagccgacctacgtgcacctgccgctgatcatgggcaaaaacgaggacggctcggtttcaaagctctcaaagcgccacggctccacgagctttcaggggctgctcgacgagggctacctcgccccggtcatcacgaattacatcgcgctgctcggctggtgcccgaaggacaatcaggagatctttacgctcgaggagctcgaaaaggcgttctcgatcgacggcatcagcaagtcgccggccgttttcgactacgacaagctgctgtggttcaacggcgaatacatccgcagcatggacgcggagacgttccgcgaaaacgcgatgccgcagtaccgcgcggtgttcggtgatgcggaaaagccttgggatgtactcgacgcgatcttgcagccgcgcatctcgaaattcagcgagattccggcgctgctctcgttctttaaggcgctgcccgactatgccgccgacctctttgtgaacaagaagagcaagacgaacctcgcaaattcccccgaaatgctgaaagcggcgatagagacgctcgggcagctcggcgactggcagatcgacgcgattcacgcggcgctgatcgagctcgcgcagcagctcggcgttaagaacggcacgctgctctggcccgtgcgcatcgcggcggcgggccagaccgtcacccccggcggcgcgatggagattctcgccgtgctcggccgcgacgaggcgctgcgccgccttgccgtcggcctcgaaaaactgacagcagcccgataatttctgaaaggtacggttacaaatatgagtgaagaaatcaaaaaagaaccggctgtgtccagcaccagctttatcgatgatttcgtcatcgaggatatcgcggagggcggccgctgcgccggcatgacggtgcacacgcgcttcccgccggagccgaacggctacctgcacatcggccacgccaaggcgatctacgtcgatttcggcacggcggagcgcttcaatggcatctgcaacctgcgcatggacgacacgaaccccacgaaggaggacgtcgagtacgtcgatgcgatcaaggaggacatccgctggctcggctacgactgggacgaccgcttctattacgcctccgattatttcgagaagatgtacgaggcggcggaggagctgatcgaaaagggcctcgcctacgtctgcgagctgacgcccgaggagatgcgcgaaaaacgcggcgacctcatgacgccggccgaaagcccctaccgcgaccgcccgaaggcggagagcctcgacctgttccggcgcatgcgcgcgggcgaatttgcggacggccgcatgacgcttcgcgcaaagatcgaccttgcctccggcaatttcaatatgcgcgacccggtcatctaccgcatcaaccgcctgccgcaccaccgcaccggcgacaagtggtgcatctacccgatgtacgattttgcgcacccgatcgaggatgcgctcgagcatatcacgcactcgctctgttctctcgagtttgaggaccaccgcccgctgtacgactgggtgatcgagaacgtgacgctgccctcgaagccgcgccagatcgagttcgcgcgtctgggcatcaacaacaccgtcatgagcaagcgcaagctgcgcgcgcttgtggagggcggctatgtcagcgggtgggacgacccgcgcatgccgacgctctgcggcctgcgccgccgcggctacacgccggcggctatccgcaatttcagcgagcgcaacggcgtttcaaaggtgaattccacggtcgaatacagcttcctcgaacactgcctgcgcgaggacctgaacctgaccgccaagcgcgtcatgggcgttctggagcctgtgaagctgatcctcacgaattaccccgaggaccgcacggagacgtttgaggtggaaaacaacccgaaccgccctgaggacggcacgcgcacggtcacgttcggctgcgagctgtatgtggaggcggaggacttcctcccggagccggtgccgaagtacaagcgcttgtatccgaacggccccgaatgccgcttgaagggcacgtacctgatccgctgtacgggctataaggccggggcggacggcaaagtcgaggagatctacgccgagtatgaccccgagagccgcggcggcaacccggcggacggccgcaaggtcaagggcgcgacgatccactgggtcgatgcgaagaacgccgtagacgccgaggtgcgcctctacgacaacctcttcaccgtggaggatccgaacgccggcgatttcctcgagcttctgaaccccgattcgctcagggtgctcgagggctgcaagctggagccgggcctcagcgccgcaaagccgggcgagagcttccagttcatgcgtcagggctatttctgcgcggacagccgcgattcgagtgcggagcacctcgttttcaaccgctccgtctcgcttaaggacagctttaaaaagtaagcggccttcgcccgcgcgggcgagcgctgcgtaaatcgattctatagagcaagggccgcggcagtgcggtcttttgctttatgcgggaggaaaagagcatggatgcgcgcatcattttgatttccggcgcctgcggcacgggcaaaacgaccgttgcccggcttctggcggagcgagcggccgccgcacgggcggtgcacctgcacaccgacgatttctacggctgcatccgcaagggctatatcccgccgtggcaggcgggcagcaaggcgcagaacgagacggcctcggcggccgcagccgctgccgcggagcagttcgcggccggcggctttgaggtctatgcggacggcgtgatcggtccgtggcttctcacaccgtggcgcgggctcgccgcgcacggcttcgacgtgcggtacatcgtgctgcgccctgatgcggaaaccgcggtgcgccgcgcggcggaaaggccgaaaaacgtgaaaatgccgctcgaggacggcgtcgtgcggcagatgtgggcggcctttgccgatctcggtctgtatgcggcacatgccgcggacacatcggcgcagacggcggaggaaacggcggcacacctcagcagcctgctcgagcagggcggcttccgccttttcgggtaagggaatccccggcgggaatgcctgccggggctttttgtcagcagaaaaccacgcgatagtcgcgtggttcaaaagaaggcttgtgccgatgatgtagaaataaaaactccttttgttgtaaaataggcttgcggtctggcaactgcaaggacaacaaaaggaggacgttcaaatgaacgacacaaacagtttatcacacacgaaagtacagtttacaagggactacacagggtaacggtctgacgggaggtatgccgcccgttagattttccatgtaatgttcaagctgtcgcttgtggcggctacggtggtaatcatcaagtccaccacccgccgcttgtcgtcaaaggatacatcgtcccatgtgtcgaggtagccggaaatctgattgacctgttccgggctgatggcttccaccgtcaactcggctatctgcttcacaagttcctgcttgcgtccgtccagttccgctatcttcacattcacataggagagcaggacattgtttgcgcccgttagactgtccaccagcttttcaatctcgctgtccacatggagaagttccacttgcagggcggcgattttcgggttggtctttgccgctttcttcctgcccgtcagcgtcttgtgcttttccagctttttcaccatctgctgatagaccaccgcttccagttcggaagtgatgattttcccacagcccggacagcttttattgtccagccgtttcgtacagcggagatattgacggcctacccggttgacgatactcataagtgcatagccgcagttcccgcacttgattttccccgccagccatgtgtgggtggctttccgggcggattggattttcatgttgttcatcagcttcttgcggcacgccagccagatgtcagaggggacaatgccctcatggggagccagcaccagcatttggtctttcaagtcgtttttcttgctggcctttacatcccgtccctgatacagataacacccgttcattcccgtaaagtcggcggcgtcattgacaatgaccgttccctgacttttgaaaaactcgtacacatctaagtctgcctgcacataaacaggattgcgtaacatctgcgccagcgtggggcgtatcagttctttgccatagaacaaaatcccctgctccgcaaagtaacgggtaatgtccccgtaggaggttgtgggctgggcgtacatctcaaatatcagccggatattggccgcttcgtccgggtttaccaccagcttctttgtgttgataccgtccattttgatcggctccgtatggaagccgtaaggggctttccctcccatcttaaagccccgctgactgcgggagtagtaagcgtccgtcacccgcttctgtatcgtttcccgttcaagctgtgcgaacacaatacagatattcagcatagcccgccccatcggagtagaggtatcaaacttttccgtagaggacacaaactccacattgtattgctggaacagttccatcatattggcaaaatccagaatggaacggctgatacggtcaagtttgtaaacaatgacctttgcaatcaagccccgcttaatatcccgcaccagttcttgaaacttcggacggtctgtgtttttgccgctgtaccctttgtctgtatattccttacagttcccgcctttcaattcgtatttgcaaaactcaatctggctttcaatggaaatgctgtcctttttgtctaccgattgccttgcatagattgcgtctattctgttattcattttatcgctccttttcttaaaaaagaaacggagctgctgacacttctattataccgccagcagccccgcaaatcaacgatggcttcggaaaaccttactccccagcttcctctttctgccgtctgtcggcgtacttgcggaacacctcataaagctgctgttccagttcccggcgtttggccgcttcctgctccggtgtgaacaccggggagaggttttccagcgtgattttctttccctgaaaagttacgacctctgtttcctttttgtatctgatattgcttataaaatcacctttcctttccataatgccgcccccgtttcaactccgtcagcacttccggcggaatacggtcaaccagcctttgcatattttccaattcgctttccagctttgcacgctccatgcggtctttgattttgccgctttcgctggcctttgcccttgcttccagcttttcattttctgctaacaggtctttaatcgtgaccttgtactttttgagttgcccggagaagttctccatctgcggaaaccattttttcagcaaggagagggcttcctctttcttctttccggcgttcagcgggttaatgccgtcaagggtggcttcaatggctctggcctgtttggagagggaaaccgcctgtttgaaaagccgggtggggatatgcttccggcctgtcttgctggcgctttccccacgctccaagtcaggatatttctccatcatataggcgtgaaaatcgtcctgccactttgtcaggtttgcccggttgccgataatctccttcgcgcacaggcggttgtcctttgtcagcggaacaaaggtcaaatgcagatgcggcgttttctcgtccatgtgtaccaccgccgacacgatattttcccggcctacccgcccgatgaggaagtccgccgccctctggaaaaacgcttgtatctcctttggcgacttcttcttgaaaaactccgggctggcggtaatgagcgtatcgacaaaccgggtgctgtctttccttgtacggcaaccggcctgttcgatacggttttgaataaaatgatagtatctgccctccggcttgacgatatggaagttgtatttactccggctggtgtcaatgtcgggattgctggcgtattgttctttctgccgttcgtgatgggcttccagcggtcttgccgggttgcccttatgcttctcaaaccgcaaaattgcgtgttgtgccattctgctactttccccgttccattcctttccggcggtttttccacagggaaaatcccgccgaaactatctctgatcggattggaatggaatagatataaattaaatatttttaatctttgtatttctatataccgtccgattttcgtacttcaagagggcggtttccgtacttcatgggtacggttttcagccctccggcgttccaaaaccagatttcttgaagtcggtgtttgaaaccgcttcataggattttgggtaaatacagttgggttttccacagccctgcttcttaatctcaatcaactccgcatactgtaactcccgcagagtgttgacggctttctgccgcccacagtggagcaagcccaccacctcacagatgggatagtacaggtaaatgcgtccgtattcgtccgcccacccgtttttccgggacaactccgcccgccgcaggataaaggcatacaatagctttgcttcgttggacaagggctggaatgtaggtgcttcaaagaggaaattcgggagccgggtgaatctgaacgccttttccggctgatgaatataaatcgtgcttgtcatagtgtgttttgtggacggttagaagcccgttttccgggggagatgatacttgataccacccgccccggtttggggcttgcgaagccttgtaaatcaaggcttttttcctgtctaactgtccacagcagacctccttttccgttcactttctgttttctgccgcctgtgaactctggcggcgcagtccgggcagtatttagcccggttggatttggggacgaatacgccgccgcagaccgcacagcatttcaagtccctgccccggtaaatctccgcttccagtgtcccggcaagcggcaagaccgcccaccgaaaccatttacagcggaccgagaaagaaaccatctgcgggcaggtgcaggtgtccccataatcaaggacaatgcagttgccgtcctcacagttacagcactcccgccgtatcaaggcattggcctgtttcctctgcgctggtgtcatgcggtagggagtgccgtccggcctgcgctctaacggcggcaggcgtttatatggattttctttcatgcgtccctccgtttgctttccgttgccgttctccccgaaaaggcttcctgccccattcctgcggcgtgttccggcgttggcacgctccccacagcttcgggccattgtggctcgaagtcacctctggacactttgtccagaagtcggctccttgcggtgcttcccccgccggatattccttttcggacggtcattctttttcaaggtgcggctcatcgatgaactaccctaagtctacacctaaatgaccgcccgtcccgtatatccgaaaggtaggaaatccgcccggaaatctccctatttccacgctctcggaattgtggtagaattaaaaatgtgaaacaacaaattggaatatggggataagaacatggatgaattacaactttcaaaattgccacggaacttttatgtatacgatatggccaagtatcattcattagactgcaaaagggaatctaaagacttacttgaaattataaattcagcaaataaagaaagtgatgtgcagagttacataaaaaagaataaaaagtggtttattcctctttcaatattgaaagcatatgatttcggacatcatttttcttgtgttgtgccagagtataatttaggtgcggagtatagattagactatttactaataggcaaaaattcattggggtatcaatttgtatttgtagaatttgaagatgtaaatgtggattataaattaaaaactgcaaattcagaatctgacaaggtaagaaaaggtctaaatcaaattcgagattggaaacgttggattaatcaaaatagagaatattttttgggtactgatggcataaaagaaatttcaagtaatgtgtttccgtggggatttcgatatgctcttgttgtaggcagaagatgtaacatggacgagatgagtaatcagttaagaggcgaattacaaagtgaggtgggggtgactattatgagttacgaccgtcttgtagattatgtagcattattacataatgggatatagataaagtggcatattgtcatgtaattgtttgtttaataaaatttatagtgcagaaaaggagggggagcatggaactatccatacaggaacgcctaaaagacttgcgtgtggagcgtggcttgacgttggaacagcttgcggagcagacccacctctccaagtctgctttaggtagttatgaagcggatgattttaaggacatcagtcactatgcccttatcaagctggcgaagttttatggcgtgaccgctgattatctgctgggattgaccgaaacaaaaaatcactcaaacgccgatcttgcagacctgcgtttgagtgatgatatgattgtgctattgaaaagcaagctggtagataattccctcttgtgcgagctggcaacacacccagatttcccccggcttatggccgaccttgaaatctatgtaaaaggcatagcaaccaaacaggtgcagagcgcaaacgccattgtggacgctgtgagcgcaaccattatgaaacggtacaatcccggcttgactgacccgcagttaaggcagttaatcaccgcccacatagacgaggacagtttttgccgctatgtgatacagcaggacataaacaagatagcccttgacctacgggaagcccataaggacgattttttcagcgtcccggaggacaacccgctgaaaggatttttacaggccgcagacgaagccgccagcgaggacggcgacccggagcaagcgtctttggcgtttatctgtaaacggctcaaattgaatttgaagaagctgtcagaggacgaaaagaaatggttgaaaaagattgcggagaaatcggacttgctgaaaaatccaaacccgcaaagggggcgaaaataagaaaacataaaattgaagttgaggtaaagataaaaatggttgaattacatggaaaagcaccgtataaggccgttttaattcatggcggtcctggcgcaataggttctttaaaaaactgtgcagaagaattaagcagattaacggaaagggggattgttgaagcattgcaatcccagtattccatagctggattgattgaagaattatatttacagattatgaaatattgtcaagaaaaaccgactttaattggtcactcatggggcgcatggttagctgttttatttgcaggaaaatacccgaagatatgtaaaaacattatcttagttggttgcccgccgcttgcagataaatatgtcaaagaaatatctttacgaagattgcgaaatctttcggacgaagaaagtaaaatctttcagagaatgatagataatgtggctactgatgaagatataaaaaagatacctagtgttttagaaaaatcggataattattacctcgaaagcagcggaaaactcatagtagacaaagcagataatgaaatttataacagaatttggaatgaagccactaagttgagaaccaatggagagttgttgacagcatttaagaatattcagagcaaactatatttaatacaaggagaatatgaccctcacccgatagaaggagtaatgaaaccgttagaagaaaacggtattccatgtaaaaactatattttagaaaaatgcggtcatagtccattcatggagaaatacgcaaaagaaaaattttatgatattcttcaggctattatataatttcccatttatcagggagatagtaaagccagccgagccagtcaacggcggcgcatttcatgcgccgccgttgacagccccgcccgtctttgctaaaggataatcaaggcgggaaagccctgaaatggcttcccgcctatttcaattttgaggaaagaaatgctccaaaatcagaaagagagcggtcaagcactttgagggattggccgccttgtccacccattcagcagaacggcgggcggcagtcaaggccgggtgtaaacccgttcatttcagccttgacggttgtccgctgtcctgctatttttccgggaatgtggccacacttcgggccactttgtccacaagtcggagcgtaggacaagggacgggggctttcatatacgccctgtctactgatgaaaccagtcctgcgcttgcggcttcacgccacgcaatcacagccctgttttcctgccgtttcaaatgcccttgtcctccccggcgacaatggcattttcacggcaacgccgacagagcgtataacacactacactttgcaagcaaagtcgtgtgccaaaggggaagcccctttggaaaccccagacaacaaaacaggctgaatatcccgcactttcccggtgcttgatactcagcctttatttattgtcagcagccctcgtttcgtggtctgcgtgtagttccttgtaaactgacctaaatggaattgcaaatatcacatagtgttcgcaccgaagtacaggaggaaagtgttctacaaagaaaagagacgagaggtagggaaaatactgagaacactttgcgaatggaaaaagataaaaattgtggaagcagaagtatgtcccgatcatgtacatatgctggtagaaataccgccgaaagtagcgatatcaagctttatgggatatctgaaagggaaaagcagcctgatgatctacgaaaagtatccggagctgaaatacaaatatcggaatcgggaattttggtgcagaggatattacgtggacacagcagggaaaaatgcaaaaaagatacaagaatatattcaaaaccaattagaagaagacaaagcaggggaacagctgacgatgggaaacttctaaaagactcgtttacgagtagcaagtaacaaacttttcgcggctgccagatcgtaccaacgtgacgtgacacgtgccgctagtaatatagggctttgcccgcatatgaaatacccccggcttcgccgggggatatttattttgcagtattgtcacctaaataaaaaaataggttgacgaatcgcgcggcctgtggtaaactgaaatcgaaaattttcgatgaccggtgcggacgtgccggaaaggaaggcttatgcgcatacaggatgcagttttggactatctcaaccggaaccgcggcggttatgtctcgggcgaggagatcgccgcctcgctcggtgtgacccgcaacgcggtctggaaagcaatcaagaaactcggtgaggaagggcaaaggatcgacgcggtgccgaagcgcggctatcggctgtgcgccgacagcgacgtgctctctgcgggcagcatcgcgcagcatctgacgacggatttccccgtgcggctcgacgtgcgccgcgaggtgacctcgacgaacacggtgctgaaggccgaggcggagcggggggaagctgaggggctcgtgctggtcgccgaggcccagacggcgggcaagggacggctcgggcgaaggttccagtcgccggccggcacgggcgtctatttcagcttcctgctgcgcccggcctgcacggccgagcactcgctgttcatcacgacggcggcggcggtcgccgtgtgtcaggcgattgaggacgtgacggcgctcagcccgcagatcaagtgggtgaacgacgtttacctcggcggcagaaagatctgcggcatccttacagaggccgcgatcgactttgaaagcggcggcctcaactgggccgtgctcggcatcggcatcaacatcgcggagccggcgggcggctttcccgaggagatccgcgatacggcgggcgcgctgttcagcggcccctgtcccgttgagatgcgcagccgtctcgccgccgccgtgatcgaccgctttttcgcgctgtacggcgatttggaggcgggccggttcatcggggaatacaagcgccggtcgtttttgaccgggcgggcgatcagtttttcgctcggcagcgaggttttccgcggcgttgtgaccggcatttccgatgaggcgcatctcttggtgcggctggacagcggcgaggagcgcgcgttttccgccggcgaggtgcagatccacaagggcttttaagcggcgtctgccgctcccgcgggccgtcgcgccgcgcgggcaggattcagtcaaggttaaggtgatgaaggatgaaaaataaggaaaaaaccattcaaattgtgctgaccggcgttttcgccgccgttttggccgtgctctcgcagatctcgatcccgatgccgacgggcattccggtcacgctgcaaacctttgccgtcgcgctgtgcggctacgcgctcggctggaagcgcggcctgcttgcggtggcggtgtataccgcgctcggcctcgtggggctgccggttttctccggcttttcgggcggcgtcggctcggtgctcggcatgacgggcggctacatctggggctttctgccgatggcggcgctctgcggcgcggggctgaaaaggagacgccgcccgatggcgctgctgttcggcgcgctggggctagccgtttgtcatctgctcggcacggttcagttcgcggcggtctccggcaggggcgtgctcgaagcctttctgctggcttcggcgccgtatctcgtcaaagatgtgctctcggtggccgcggcatacggcgcggcggcggccttgcagctcagtctaaaaaagagcggcttcaagcttgcatcgtgatttgcaggcggtttcggaacattttccgaaaccgctttattttttaacatttttgtgctataatcagaaaccgaaatcgaggaaaggcggggagatcatggacgttcaggtcggagaccgtttgcagatgaaaaaggcgcacccgtgcgggagccatatttttgaagtgctgcgcatcggcgcggattttaagatccgctgcacgggctgcggccgcgaggtcatggtgccccgccacaagtgcgagaaaaatattcggaagatcctgcgcgagagcgcgggggacgagcgttagcttcccggaaattcggaaaagaagcgccgagcccatggggcgcatgccgcggacaaagccgtgcgggcgcgcggcccgtacagatcatgcggcgcacaggctgaaaacggccttgaaaatcggaatttcagaaaggaaaaatacgctatgtttgaaaatctttcggtttttgaaaaccgatatgaggagctgaatctcaagctgtacgacccgacagtcgcggcggaccgcggacagtatgcggcgctgatgaaggagcacaaggaaattacgccgatcgtcgagcagtaccgcgcgctgaaaaaggccgaggcggacatggagggcgcgcagcagcttttggacgacccagcctccgacagggagctgcgccagatggctgcggaggagctgaacgcggcgcgcgaggacgcggcgaagatcgcagagacgcttaaagtgctgctgctgccgcgcgacccgaacgacgagcgcagcgtcatcgtcgagatccgcggcggcgcgggcggcgaggaggcggcgctgttcgcctacaacctctaccgcatgtacacgatgtacgccgaaaggcgcggctggaaaacggagatcgtcggcctgaacgagacggagctcggcggttttaaggaggtcagcttcacgatcgacggcgacggcgcgtactcgcggctcaagtttgaaagcggcgtgcaccgcgtgcagcgtgtgccggagacggaaacgcaggggcgcatccacacttcgacggcgaccgtcgcggtgctgccggaggccgacgaggttgagctggagctcgacccgaaggatttacagatcgacacgttccgctcaagcggcgcgggcggccagcacatcaataaaacctcgtcggcgatccgcgtcacgcacctgccgaccggcacggtcgtcgagtgtcaggacgagcgcagccagtacaaaaacaaggacaaggcgctccgcgtcctgcgcgcgcgtctgctcgacgcgaaggtctcggcgcagaacgccgagatcgcggcaaaccgcaggagtcaggtcggcaccggcgaccgctccgagcgcatccgcacgtacaactacccgcagcttcgcgtcaccgaccaccgcatcggcctgacgctctaccggctcgcggacattctgaacggcgacctcgacgagatcatcgacgcgcttatcgcggcggaccgcgccgagaagctcagggaaagcatggaaaacggatgaacatggatacacgcattttgcatgccggacaggcatatgatatagaggcggcgggggaaatcctccgacggggcggccttgcggcgatcccgaccgaaacggtctacggcctcgcgggcaacgcgctggaccccgcggtttccgcgcgcatctacgcggtcaaagggcggccgtccgacaacccgctgatcgtacatatcagcgcgctggaggagctgccgccgctcgtcgcggagattcccgaggcggcggaaaagctggccgcggcgttctggccggggccgctgacgatcatcatgaaaaaatcggcgcttgtgccgaaagagacgaccggcgggctcggcaccgtcgcggtgcgcatgccgtcgcacccggcggcgcgcgcgatcatccgtgcggcgggcgtgccgctcgcggcgccgtccgcgaatctctcgggcctgccgagcccctcggccttcgagcacgtctgcgacgacctgatgggccgcgtggaggcgatcgttgacggcggcgactgcgcggtcgggctggaatcgacggttatcacagtcgtcggggacgtgccgcgcgtgctgcggccgggcggcgtctcggtcgagcagctccgcgccgtgctcggccgcgtcgaggtggatcgcgcggtgctcgaaaagcccgccgaaaacgcgcgcgtcgcgtcgccgggcatgaagtataagcactacgcgccaaaggcggagatcacgatcgtggacgctgctttcgaggattacgcccgctttgtgaacgcgcaggcgggggctgtcgcgctctgctttcagggcgaggagctgcggctcagcgtgccctgcgtgccgttcggccgcgcggaagacgcgctctcgcaggcgcacgatttgttcgcggcgctgcaccggctcgatgcggtcggcgcgaaaaccgtgtatgcgcgcatgccgcggcgaaacggcgtgggcctcgcggtgtacaaccggctgatccgggccgcggcgttccgtgtgctcgcgcctgaaagcgcgtgggtgatcggcctcacggggcagaccggcgcggggaaatcaacggtttcacagcggcttgccgcgcgcggctgcgcggtcatcgactgcgacgctgtgacgcgcgacccggcgctctacagcggcgaatgccttgcggagttgcaaaaagccttcgggcgtgatattataaggccggagggcacgctcgaccgccgcctgcttgcgcgccgcgcgtttgcggacgacgaatcgacgcagacgctgaaccgcatcacgcatccggtgatcttcggccgcctgcgcgcagagatcgcggcgaaaaaggcggctggggcgcgggtcatcgtactcgatgcgccgacgctctttgaggccggcgccgagcggctctgccggcgggtcgtgtcggtccttgcggaccgcgcggtgcgcagggcgcgcattttgaggcgcgacggcatttccgaggcggaggcggagcaccgcatgcaggcgcagcaggcggacggcttttacgccgcgcgctcggattatgtgctcgacaacacggcgtccgtttcggatgcggatatagacgatatgctcgcggcgctcggctgcgggcggcagggagacggattttgagacgaaaccgaaaacaaaggcgccggtggcctgccgtgctcgtggcggccgcactgcttgtagggttcgcggtattcgcattacaggcggtgcagccggatgtgcagaagctcagctacccgcgcaaatacgagtccattgtatcagcgcaggcggcggaatacgagctggaggaaagcctcgtctatgcggtgattaaagcggaaagcggatttgacgccgaggccaaatcgtccgccggcgcgatggggctgatgcagatgatgcctgacacgttctactggatgcagacgcatgtgggcgagacgcacgacgaggcggcgctgtatgagccggcggtgagcatccgattcggctgcgcgtttctcagcctgctgctcagggagtacggcgacctgacggtcgcgctctgcgcctacaacgccggcatgggaaatgttgcctcatggctttcggacagcgcgtactccgacgatggggagaccctgaaggcgatccccttcggcgaaacggaggcgtacgttcagaaggtccttcaatacaaggaagcatacgaagaaatttattatgggggaatgaaaaatggctaaaaaggatgcggagaaatctgcaaaggcgctcagcgaggcgctgctcaacccgcgaaagaacggcttttttgcagtctcggacgagaagatcgaaaaggccgacaagttctgcgagggctacaaggcgtttctcgacagcgcaaagactgagcgcgaatccgttgagtacgcggtaaaggcggcggaaaagcacggcttcgtgccgtttgacccggcgcacgaatatgcgcccggcgacaaggtgtactacaacaaccgcggcaaggcgttgtgcctcgcggtcatcggcaaggagggctgcaaaaacggcgtgcgcatcgccgcggcccacatcgacaatccgcgcctcgacctaaagccgatcccgctctacgaatcgagtgagctggcgtacctcaagacgcactactacggcggcatcaagaagtaccagtggacggcgatcccgctcgcgatgcacggcgtgatcgtaaagcgcgacggcacgagcgtcgcggtgcgcattggcgaggagccgggcgacccgcagttcacgatcaccgacatcctgccgcacctcggtgcggatcaggcgcagaaaacgctcggcgcggcgttcacgggcgaggatctcaacatcctcgttggcagccgcccggtgcgcgacgaggaggcgaagaacgcctacaagctcaatgtcatgcgccttttgaacgagaaatacggcgttgtcgaggccgatctcatctctgcggagatcgagtttgtccccgcgtttaaggcggtggacatcggctttgaccgcagcctgatcggcgcctacggccacgacgaccgcgtctgcgcgtatccggcgcttgaggcgatcctcgcctgcaagaacccggtgcagaccgtcgtgacggtgcttgccgacaaggaggaggtcggcagcgacggcaataccggtctcaactccgagttcatgcgctacttcatcgccgatctcgcagaggcggagggcgaagtgccgcgccgcgtgctctcgaagtcggcctgcatttcggcagacgttaccgcggcctacgacccgcattacgcctccgcgtatgaggcgcagaattcctgctacatcaacggcggcctcggcatcgcgaagtacacgggctcgcgcggcaagggcggcacgagcgacgcgaacgctgaatttgtcggccgtatccgccgcacgtttgacgatgcgaacgttctgtggcagatcggtgaactcggcaaggtcgatcagggcggcggcggaacagtcgcgaaattcatcgcgaacctcaacgtcgacgtgctcgatgtcggcgtgccagtgctctcgatgcacgcgccgttcgaggttgtttcgaagctcgacgtctacatggcctacaagggctttaaggcgtttttcgaagaaaagtaacagacgggcggcagaggctttggctttctgccgcccttcatatttctggaaaagccgggtatactgcgaagtgaatggataaagagagggggagggctttatggacatccgaactgttcggcgtgcggcggagctgctttcgcgcctttcgggccgcaggcaggaggtggcggtgctgccgatgcgcgtgcagaaggccccgtttccggatgggccggccgatgcgctgccgcgcgccgtgccggaatctgtcggcatccaaagcggctatttgcaggaatttttgaagcaggccgcggcggataagacggaaaacctgcacagcctgacagtgctgcggcacggcaaggtgatcgccgcgtgcagcttcgcgccgtttgaccgggacgtgtggcatgtgacgcactcgctgtgcaagacggtgacgggcctgtgcgccggcattctgatcggcgacgggctgctctcgcccgacgagcgcgtcgtcgatctgttcccggaaaaggcctcgccgctcgcgcgcatccgctggcgtggcctgctcgtgcgccatctgctgaacatgacgagcggcgcctcgctgaacgaggtggcgtccgtcacgcagatggactgggtgcgcggctttctggactcgacgccgcagtttgagccgggcagggaatttcagtacaacagcatgaattcctacatgctttcggcgatcatctgcaaaaagacggggaaaacgctgaccgaatttttagaggcgcgcctgttcggcccgatgggcatccgcaatttccactgggagacgtgcccgctcggcatcgagaagggcggctgggggctttacctcaagcaggaggacatggcaaagctcggcctgctcgtgctgcggcgcggcgaatgggcgggcagggcgctcgtgccggcggactatatcggcgagatgagccgcaggcagagcgagccgccggagagcatgagcgactacggctacggctttcagtgctggctgtgggcgcggccgggctcggttttgttcaacggtctgttcgggcagaacatccttgtaatcccggagctcgatatggttatcgcctcgaacgcaggcggaaaccgcatgtttggcaagtcctcctacttgtcactctgcgagcggtatttcggcgccggggtgcggcttcccgaccgatgcccgccggacccgcgcgcataccgcaggctttgccggacggtgcggcagcttgaagccggcgcattgccggaaaaaggcgttttcagctttttggagcggcttcggcagcagaggctgcgcgaaacgcacagtgcggcggtcgcgggccggcgctatgtgtttgagccgggtgcggcgcggctgctgccgctttttgtgcagcttctcgaaaataactacacgaccggcatcagcgccgtctgcttttcctgtgaagcaaaacaactttacatcacgtttgaggaaggggaggagcgcaacacgctcgaggtcggcttttcggcggcggcgcgcggcaaggtgtgcgcgaacggcgaggaacagcttgtcgcagtctccggcgtctggacgcagaacgaggacggcgtgccggtactaaagcttgacattgcgtttctcgagcaggcgagcacgcggcacatcaagctgtttttcgacgcggaggagacggttcgcatgcggatcacggagacgccgagcaagcaggccctgcaggacggcgcggcggccattttcggcgggaaccgcctgctcggcgcgttttccggcgcggttgacggcaaggcgcgcatggaagcgtggctttcggcgctcgccgaaccggagctgaccggtcggctcgagagggaagaggaaaagcgcggggcgaaatgagaaaagcgtctgcctattggcggacgctttttttctgtaatggcattttgctttacaccgggaggcggtccagctcgtcctcggtgtaaaccgggatgccgtttttaagcagcagtgcggccgtgacgccgtttccgggcaccttgccgccggagaacgtgccgtcgtagatcaggcccttgccgcacgaggggcttttcgccttgagaatcgcgaaatcggcgcggttgagctgggcgaggtacagggcggcctctgcgcccttcctgtatgcggcggttacgtcgcgcccgcggttcgacatcaccctgtccccgacgatttctgagggcgcgcgcggcgtttccagcccgcccatctgctccggacatacgccgagcagcacgtgctcctcagcgagcgcgaggatgcgttcatttttgcagtcgtcgcccttatagcggcacgcgcagcctaagaggcagctgctcacgagaatgacagccatcgttttccacttcccttttccgtgttgttgaaattctgttgaaacgattgtagcacgatcactttttgccgtcaagccggttgcgcgcgcggcggaactgtgctatgatgtaaaaaaatacgcgttcgatggcgagaaatggtggtttatatggaggaatatctctcgaggctgacggttttcacacacccgctgatccggcacaaggtcagccacctgtgcgatgtgaacaccggctccaaggaattcagcgagcttgtgaaggagctcgcgatgctgatgggctatgaggtcctgaaggatctcaagatgaaggacgtcgagattcaggcgcccctgcagaagattgtgacgccggtgcttgccgaggatttcacgatcgtgccgatcctgcgcgccgggctcggcatggtggacggcctgcgcgcgctttcgccgacggcgcgggtggggcacatcggcctgtaccgcgacgaagagacgcttttgccgaaaacgtactacttcaagctccctgtcgacgcgcagagcgggccggtcatcgtcgtcgacccggcgctcgcgacgggcggcagcgccgatgcggcgattcagttcgtcaaggattccggctgcacgggcatcaaattcatgtgcattttcgcctccgaggtgggcgtccgcctgctctatgagaagcacccggatgtcgagatctatgccgcgaattatgcgcccggccccctgagcgagcagggctatatttacaccgccgcgggcgatgccggcgaccgcctgtgcggcacggtcagctataagccgcagaaggcggagggataagccggaaaaaattcccgaggaaaagcgttccgatcaaatttcggggcgcttttttggcgtgattcacaaatcgttcacggattcgacacgattcgttgactttcccaccgccgtatggtagaataccggggaaaaaattaagggagagataaaatttgaagctcatttatgatgtggctgacaagccaaagctcagcaaaacgctcgttttcgcgtttcagcagatgatcgcgatcatggcggcgacgctgctcgtgccgatgctcgtctcgggctacggcctggaggcggatgttgcggcggcgctcttcggcgcaggcatcggcacgatcgtctacctgctcttcacgaagcgcagaagcccggtattcctcggttcgtcctttacgtttctcggcgcgtattccgcctcgatcggccagaattacggctactggggcatgatcatcggcgtgacctttgccggcctcgtctacgtcgtcatcgcgctgtttgtccgcctcatcggctccggctgggtcaacaagctgatgccgcccgtgatcatcggcccgatcgtggcgctgatcggcctctcgctttccggcacggcgacgagctggatcatgggcaacggcgcggcggagatcgtctacacggagacgtacaactgggtttccatcgtctgcgcgctcttcacgttctttatgatcgtcatcgcctcggtgaagggctcgaagcgcgtcaagctgatcccgttcatcatcggcatcggcgcgggctacgcgctggcgcttgttttcacgctgatcggcctcgctgccggcaacccgtatctgcaggtgctctcgttccagccctttatcgataccttctcgagcttcagcttcacgagcatcatcgattacccgaaattcttcttccttaaagcgattcagtcaaacgggcagtacccgctcgacgcggcggccatcggcaatatcgcgatgatttacgtgccgatcggcattgtggagcttgcgcagcatatcgccgaccacaagaacctcggcagcatcatcaaccgcgacctgatcgccgaccccggcctcgataaaacgctgctcggcgacggcgtcggctcgatcgtgggtgctgtattcggcggctgcgccaacacgacgtacggcgaatccatcgcctgcgtggcgatcaccggcaacgcctcggtcgtttcgattctcacggcggcgctcggctgcatggtgctctccttcttcacgccgttcgtcgttctgatcaattcgatcccgaagtgtgtcatgggcggcgcgtgcatcgcgctgtacggcttcatcgcggtttccggtttgcagatgctgcaaaaagtcgacctcggcgacagccggaacctgttcgtcgtcagctccattctggtctgcggcatcggcgggctgtacttcggcttcggcaataacccgatcaccggcggcgcgctgctcaacatcacgtcgcttgcagtcgcgctgatcgtcggcgttgtgacgaacctgatcgtgcacggcggaaagctctcggacggtgcggatacggcgccggccgcaaaatcaaaaaagaaaaagtaagtgctttaggggcttccgggcttgtgatccggaagccccttctgcatggcggcgcggcaaaaaggctgcgcgcggcctcgcggcggattgccaaaaagaaattttctgctatactggaaacaggacatacaggtgtcctgtttccccgtgtacaataaagctgtgagaaggaggggggaaagcgtgaaaatcgaccgtctgatcggcattctgtcgatccttttgcagcgggataccgtcacggcgccggagcttgcggcgcggttcgaggtatcgcgccgcacgatcggccgcgatctggaggcgctgtgccgcgcgggcatcccgatcgcgacgcggcagggggcaaacggcggcgtctccattctcggcagctacagactggaccgcacgctgctgacgggcgcggagatgcgggacatcctcgcgggcctgcgcagcctcgacagcgtaaacggcacgaaccgctacgggcagctgatggaaaagctcgaggccgggtcgtcggatttcatggcggggaatcagtccgtgctgatcgatctctcggcatggtaccgcgattcgctcgccccgaagattgagcggatccgcagtgcgatcgacaccgcgcgcaaaatccgcttcacgtattacgcgccgggcggcgaaacggcgcgcaccgtagagccgtattacctgatcttccgctggtcgagctggtatgtctggggctactgcgagaagcgcgcggacttccggctgttcaagctgaaccgcatggacggtctgcacgttacggcggaggcgtttcagaaacggcccgtgccgctgccggacctgcgcaatgagcgcgtgttttccggcggcatccgcgtgaaggcgctgttcgcaccggaatgcaagtggcggctcgtggaggaattcggcccggcctgcttcacggtgcagccggacgggcggcttctgtttgcggcggattacacaagccgggaggaactcgtcacgtggcttttgacctttcgggacaaagccgtgctgctggagcccgccgacgtgcgcgcggcgcttcgggaggccatcgggcgcatgcaggcgttatatgaggaaaggggaaatgagacatgaagtatacttggctggacgattacctgctgcaaaagcgcggggtgacgaaggattttcagctgtcttggaactgggtgcgctaccacatcggcggcaagatgttcgcggcggtctgcttggacgacggcggcaggccgtattatatcaacctgcggcttgagccgatgaacggcgagtttctgcgcgcgcagtacgccggggatgtgatcccgggctattacagcgacaaaacgcactggaattccgtgcggccggacggcgcggtgccggacgaaacgctgcgcgcgatgctcgatgaatcgtaccgccttgtgctgggcggcctgccgaaaaaacggcagcgcgaagcgctcgggctgacctgctgtggcacggaatgcagcggctgcgcgtttttcggaaaggaatgcgcgggctgcaacgcagcggccggcaaagtgttccacgcgccggcgggccgggcctgtccgatctacgcgtgcgcggtcaacagaaagcatcttgcgacctgcgccgcctgcgagagcctgccgtgcggtatctggcgcgcgacgcgcgacccgcagctttccgacgcggcgttcgaggattcgatcgcacagcgggtgcggaatctgaaaggggaataatcgtggctttcgactacaaaaaagagtataaggaattttacctgccgccgcgcgcgcccgggctgatcgaggtgccgcagatgcgctacatcgccgtttcgggcagcggcgatccgaacgcgccggacggcgaatacaaggccgcgatggggcttctgtacggcgttgcattcacgatcaagatgagcccgaagggcggccggcggatcgagggctacttcccgtacgtcgtgccgccgctcgaggggctttggcagcaggcgggcggcggcgcggtcgactatgccgataaatccggcttttcgtggatctcgatgctccgcctgccggcgttcgtgacgccggcggatttcgactgggcggtgcggcaggccgcggaaaagaaaaacacagatttttccaaggttcggctgttcacgtacgacgaggggctctgcgtgcagtgcatgcacgtcggtccctatgacgcggagccggaaacgctcgcacgcatggagagatttatgcgggaaaacggccttgcgccggatctttccgacgcgcgctgccaccacgagatctatctcggcgacccgcggcgcaccgcgcgggagcggctgcgcacggtgctgcgcctgccggtgcgccgcctgccgtgacggaacgcgggcgctgaattttgctgtgcgcgcccggcggggcttgcttttttccggggcgtccgtataatagaaggtatcggaaaggcagggcggcgcaggccgccggagaggagcgggcatggagcagaggaacaggaatacgcgcggcgcgcgcaagaggcctcccattcggcggcgcaggcgcaggtcggtctataagccggactacgcgcgcgtgcggcagatcgcgctgacgaagcggatcatcggcgttctgctcgcgcttcttctggcggccgcggctgcggcggtgctgctcacgtgggtgatcccctctgccttaaaggcgctggagccctcgccggccgccatggcggagagcgatgcgccggccgagggggagagcgctttggagcagcctctgggatacgacgaagagaccggtctgccgctctacggagacgactttaatctgttcgtcatcaacgaggagaatccggcggagagtgacttcgcgccggttctggctgaggcggccggtgtggaggtggacgcgcggattgcaccggcgctttcgatgctcaccgaaaaggcgcatgaggccgggatcgagctggaattttccgcgggctttgtctcctacgaggcgcaggcggcgctttatgcggcgcaggtcgaagcgctcgtggaggccggatcgaccaaggtcatggcgcgcgaggacgcgcggcgcacggccccggcgcccggggaatcggacatgcagaccggcctgtgcgtgacgctccgatacacgacgcaggaagaggatgcgggcggctttgcgggctcggcggcgtatagctggctgcaaagcagcatggggaaatacggctttgtgttccgttacccggcggataaggcggattacacgggcgtcgggcagaacgacctcgtgctgcgctacgtcgggccggaaaacgccgcggcgatgcgccggctttcgatgtgccttgaggagtacgtcgaatacgccggctgaggaggggcgacggatggaacgcagatttgtgcagtgcatcgaactgaccggcgagcttgcagcggattcctatctgcacgatgtgccggcggttcgctatctggaaacggccggtcgtctggagtttaacagcggtgtgacgtttctcgtcggcgaaaacggtgccggaaaatcgacgcttttagaggcggttgcggtggcctgcggcttcaaccccgagggcggctcaaggaacttcagcttttcgacgcgcgagacgcattctgaactcggcgcggcgctgaccgttgtgcggtcggcttacccgaaggacggcttcttcctgcgggcggagagcttttacaacgccgcgagctacctcgacgcgctcggagacgagaggatttccagcagctacggcggctcgctgcacgagaaatcgcacggcgagagttttcttgcgctcgtgcagaatcgtttccgcgggcacgggctctacctgctcgacgagccggaggccgcgctttccccgatgcggcttttgacactgatgggggagatcgaccgcctgctcgaaacgggctcgcagtttattatctcgacacattcgccgattctcatggcgtttccgggcgcagaggtgctggagatcaccagagcggggatttctgcggtgccataccgggagacggagcacttcgaggtcacgcgccggttcctcgaaagtccggagcggatgctgcgcgtgctgcttgaaaaaggcgcgggcggataaaaaagttttttcaaaaaaaccttgcaatttccacgcttttgtgctaacattatcaatgctatgtttaagtgttaacttaataaccgcagagatcaaccgaaagaggtgacagatatgaaaaatattcatccggactatcaggatacgaccattacctgcgcatgcggcaatgtgattcatacgcgttccacgaagaaggacatccgcgttgaaatttgctccaagtgccatccgttctacacgggcaagcagaagctggttgatacgagcggccgcgttgacatgttcaaaaagcgctacggtatcacgaagtaattatttatacggttcggtttgggcggtgctttgcggcatcgcctgttttttgttcggaaacgggcgcgtgaggagggtgcggctatggcacagtacaaaacggttttgcaggaggcgcaggacgatttcgtcgaaaagcgctcgcggtttatcggctatgcgaggcccgtctcgaccgaggcggaggcgctggcctttatcgctgagaaaaaatcgaagcattgggatgcttcgcacaacgtatacgcctacattctgcgcgacggcggcgtgatgcgctattcggacgacggagagccgcagggcaccgcgggcatcccggtgctcgacgtgttgcagaaaagcggcgtgaccgacgtggtcgtcgtcgcgacgcgctacttcggcggcattctgctcggcggcggcgggctcgtacgggcttattcgcacacggcatcgatcgccttgcaggcggcgggcatcgtgacgatgcgcgaatgcctgatgcttgaggtcctctgcgactacgggcagtacgggcgcgcggcggcgctcgtgcccgagtgcggcggcgtgatggacggcacggtgtttgaggaaaaggtggcgctgcgcttccacatggcgccggaggattacccgggctttggcaaaaagctcgccgatgcgacgaacggacaggtcaaagcggtggaaaccggaaaaaaatattttgaatttctcgaataaggaagtaattttgacgtttgcggcgtataaattataatgaagggtgctttttgctcttactttaccagatggaggtctgggcgatggaaaaatgtgcagtttcttccgggcggaagtattatattgcgagctgtcttttcacagcgcgtttcccggaaaccagtctgaaggtacagcgatacataaaggaccgcggggatatcgaaaccgtccgctgctgtatccccaatttcacagtacagcagaatacggagcgcatcccggacgatacggcgcgggcggtatggaaaagcctgccggattcggcggcgctccgcccgggcgacaccgtgtactcgatttgccacaactgcacgaacatcgcggacgagcagcatcccggcatccatgtcgtttccctttgggagctgatcgaccgggatgaaggctttgcctttccggattacggcggcatgcaggttaccgtgcaggattgctggcgcacgcgcgaacgtgcggcggagcaggcagctgtgcgcagcctcctgcacaagatgaatatccggtatgcggagctgccggaaaaccatggacagacggaattctgcgggagcacgctctaccgagagcagccggcgaagaacccggcgtttgcaccgaaacactatattgaacaggcgggcggaaaattccggccgcacagcaaggaggaacaggtcgcgatcatgcgcgactactgcaaaggctttgcgacggacaccgtcgtgtgctactgccactactgtctggagggccttctggaaggaggcgccgacgggcggcatctggcacatcttttgtttccgtaacacacagttcgacgatgcagggagggattgcccatggagaagcaggcactgagcattcgcgaggagacgcagcgcatcgagcgggagacgctctcgccctatgcggcgctttccgagaacacgcgcggcagggtgcgcgaaacggcggcgtgcgcgatccgcacgccgtaccagcgcgaccgcgaccgggttatccactgcaaggcgttccgccggctgaagcataagacgcaggtgttcctctcgccggagggcgaccattaccgcacgcgcctgacgcacacgctcgaggtttcgcagatcgcgcggacgatcgcccgggcgctcaggctcaacgaggacctgacggaggcggtggcgctcggacacgacctcgggcacacgccattcggccatgcgggcgagcgggctttgaacaccctgatgcccggcggcttccgccactacgagcagagtgtgcgcgtggtggagaggctcgagaacgacggccgcggcctgaacctcacctttgaggtgcgcgacggcatccgctgccacacggcggggcgggaggccgtgacgatggaagggcgcatcatccgctgggcggacaagatcgcctacatgaaccatgacatcgacgacgcgatccgcgcgggcgtgatccgggaggcggacatcccgcgggacatcaccgcggtgctcggcgacacgaagaacaagcgcatcacgacgatggtcacatcgctgatcgaaaacagcccggccggcgtcgtcggcatggatgcggacgtgctcgcggcgtatgaggcgctgcacgtctacatgtacgaatcggtttacctgaacgactacgcgaagcgcgaggagaaaaaggtgccgcatttgatcgagagcttgttccgctactatgtgcgccacccggaccgcctgcccgaaagcatgcgggacatcgcggaggcggacggaagagagcaggcggcgtgcgactacatcgccggcatgacggaccgctttgccgtcgatctttacagcaatctctttatcccgaaggcctggggcacgccggtctgagggtgttttgaaaggaggcggtggtttggcactgcctgaggcatttatgcaggatctcaaatcccgctcggacattgtggacatcatttcctcgtatgtcaatctgaagcggcgcgggaaaaacatggtggggctctgcccgtttcacaacgagaaatccccgtcgttcaatgtgtatacggaaaacggatcgttctactgcttcggctgcggcgcgggcggcgacgtgatcacgtttatccgcaagatcgaaaatctcgactacattgaggcggtcaagctgctcgcccagcgggcgggcttgcaggtgccggagcagggcgtggacgattcgatgtcccgcctgcggcagcgcgtgctggagatcaaccgcgaatcggcgcgtttctttcatgcgtcgcttttaaagcccgagggcaagccggggctcgactacttcgcgcgccgccggctgccgatgcagatgatccgccatttcgggcttgggtgggcgccggaaagccgctttgcgctcgtcaaccacctgcgcgcgaagggatatgccgaaagcgagctgattcaggcgaatgtcgcggtgcagacgcgctcgggccgcgcgatggaccgcttccacagccgcgtgatgtttccgatcatcgacctgcgcggcaacgttgtcgcattcggcgggcgcatcctcaccgacgagaagccgaagtacatcaacacctcggatacgccggtctaccacaagagcagcggtctgttcgcgatgaatttcgcgaaaaatgcgctcgacaacggccggctgattctggccgagggctatatggacgtgatctcgctgcacaaggccggctttgaaaacgcgatcgcctcgctcggcacatcgctgacggcggagcaggcgcgcgtgatggcccgctacgcgaaggaagtcatcatctgctacgattccgacgaggcggggcagaaggctgcgcagcgcgcgattccgattctgcgcggcgcgggtcttcttgtgcgcgtgatggcggtgccgggcaacaaggacccggacgagttcatcaacagctacggcgaggagggcgcggcgcgcttcagaaagctcatagaggactgcggcagcgacgtcgaataccggctcgacaggctcaaaagcggcttcgacctcgagagcggcgacggcaaggtgcagtacctgatggaggccgtgaacgtgctcgcacggctcgacaatgcgatcgagcgcgacgtgtacgtcggccggctttcggaggagctcggcgtcgataaaaacgcgatcctcacgcagatgaagcgcagcatgcggcaggaaagccgtgccgcccagaagcggcagcttcgggagacgaccgaggcgctttccgcgcggcgggacgagatcaaccccgagaagcggaggcacgtgcgcgtcgcgaacgcggaggagcgcttgattgcgtgcctgttcgcgcacaacgagcttgcggcatcacttcgggaaaagctgccgccggaaaagtttgtgaccggcttcaaccgccggttatatcagagcctcttgggaaagattataaacggagaaaccgcaaacgcgccgggaatcagcgatttttcggcggaatgcacgccggacgagatggggcgcgtcgccgcgatcctccgcgaaagcagcggcacgacggcggaggacgccgagcgctttgtgcagatcattctgagcgagggcgggctttcggatgcggaggcgatccgcgcgagcgaccccgcgcagctgcaggcgcagtttgaggcgctgcgcaggcagaaaaaatagatggaaagcaagtcgatcgaccgatcggaaggaataagggaaaattcaggaaaggtttggtaaacagtatggcagcacaggataagaaatccgtcatccgcgagctgatcgagctcggcaagagcaaggggcagctcaccacgaaggagattctcgacgcgctcggtgagcttgatttcgacccggagcacatcgaaaaattttacgatacgcttgaatcgcacggcgtcgagatcatcgaggatttcggcgacatccagatcgacgacgtggatctgacgaaggtcgcgaacgagaccgcggaatacgagagcggcgtcagcatggagggcgtcgcgatcgacgatcctgtcaaggtgtatctcaaggagatcggccgcgtcccgcttctgacctcggaggaggaggtgcgcctcgccatcgcgatcaaggacggcaacgaggccgcgaagaagcgcctttcagaggcgaacctgcgcctcgtcgtcagcatcgcgaagcgctacctcggccgcggcatgcagttcctcgacctgattcaggagggcaacctcggcctgatcaaggccgtagagaagttcgactacacgaagggctttaagttttccacctacgcgacgtggtggatccggcaggcgatcacccgcgcaatcgccgatcaggcgcgcacgatccgcatcccggtgcacatggtcgagacgatcaacaaggtgaagaaggtctcgagccagcttctgcacacgacgggccacgagccgacggcggacgagatctccgaggagctcgacatgccggtggataaggtgcgcgagatcatgcgcgttgcgcaggagccggtttcgctcgagacgccgatcggcgaggaggaggacagccacctcggtgacttcatcccggacgacgaggcgcccgccccggcagacgcggcctcgcacacgcttttgcgcgaaacgctcggcgacgtgctcgattcgctgacgccgcgcgaggaaaaggtgctgcgcctgcgcttcggccttgaggacggcagaagccgcacgctcgaggaggtcggcaaggagttcaacgtcacgcgcgagcgcatccgccagatcgaggcgaaagcgctcagaaagctgcgccacccgagccgcagcaagaagctgaaggattttctcgactgagccggaaaggacgctttgttatgcatatgacgctggaggcggattacgccgtgcgcatcgttgagtttctcgcgatgcacgcggagcgggtcgatgccaagaccatagcggaaaaaacgaatgtgacgctgcgctttacgctgaagattctgcgcacgctggtggcggacggcatcgtctgctcctataagggcgcgaagggcggctacaggctcgcgcagccgccgcaggagattacgctgcgccgcgtgatcgaggcggtggaggggccgtacatgctttcccgctgtcagggcgagagctacagctgccaccgcacggactgccggctgcacagcatctacagcgagatctcgaagctcgtgcgcgaccggctcgattcgtatacattcgattcgatctgctcttgcgacgaggaggaacaggccgaaaaatagaccgcattctttcagaaagaattggctgccgctgaaaacggcagcttttttcgccgggaggaatttccggtgcgtatctgccgcccggacatgccgcgcgcatagacacggcttatcggggcggcagactgcacgtttgggggttgccagccggtgtgccgggaaagaccggtctgaagcgtcgggcacaaaaaaggctgcacagatacctctgtgcagcctcgcgctttttataccgaaatacggaaaaaatcgatgggaaatgcttgacaatccatacaatatggtgtactatattataatgtatcatcatggatagatatgcgatttcgctttctttagcgcattataacatataatccgcaaagaatcaagcaaaatctgaaatttccacatgaacggatatttttttcagcgtttttaagctattttgtcttaagaacatgggccaaaatctatgaatggagtggttgagtcaatggtgaatgttaagccggtacagcttggcaaaaacacgcgcatgagcttcgcacacatcaacgaggttctcgacatgccgaacctgatcgagatccagaagaattcctacgattggttcctcaaggagggcctgcgcgaggtgttcaacgatgtgtccggcatcacggatttcaacgggaatctcgtgctggactttgtgaactacaagctcgacgaaaaacccaattacacggtcgccgagtgtaaggaacgcgacgccacgtttgccgcggcgctgcgcgtgactgcgcgcctcctcaataaggaaacgggtgaaatcaaggagtccgaggttttcatgggcgatttccccctgatgaccccttccggcacgttcgtgatcaacggcgccgagcgcgtcatcgtttcccaacttgtccgctccccgggcgtctactacaagatggagtacgacaaaacgggcaagcagctcttctcctccaccgtcattccgaaccgcggcgcatggctcgaatacgaaaacgacgtcaacgacgtgctctatgtgcgcatcgataagaacagaaagatcccgatcacggcctttatccgcgcactgggcatgggcacggacgaggagatcaaggcctatttcggcgaggacgagcgtatcctcgcgacgatcgagaaggataccacccacacgatggaagagggccttttcgaggtttacagaaagctgcgcccgagcgagccgcccacgatcgagagcgcacagtcgcacctgaacggcctgtttttcgacccgagacggtacgatatgtcgagagtcggccgctacaagtacaataagaagctgaaccttgcgggccgcatcgcgggccacccgcttgcccgcccggtcgtgaacccctcgaccggcgagatgatggccgacgccggcgtggttgtcacgcgcgcgatggcggaggagatggacgacgccggcgtgaccgtcgcgtacctcaccgtcgatgagaaggaagtgaaagtcctctcgaacggcatggttgacatcaagaagtacgtttccttcgacgcggaagccgaatgcaacatcaacgagcgcgtgcgctatgccgtgctcagcgagatcctcgaggcctgcggcgacgacgaagcggcgctcaaggagatgctcgctgcccgccgcgacgacctgatcccgaaccacatcatcatcgacgacatcttcgcgtcgatcaactatatgacctgccttgcggtcggcgtcggccagaccgacgacatcgaccagctcggcaaccgccgcatccgctcggtcggcgagctgctgcagaaccagttccgcatcggcttctcccgcctcgagcgcgtgatccgcgagcgcatgacgctgcaggcacaggatatggaggcgctcacaccgcattccctcatcaacatccgcccggtcgttgccgcaatcaaggagtttttcggctcctcgccgctgtcgcagttcatggatcagacgaacccgctcgccgagctgacgcacaagcgccgcctttcggccctcggcccgggcggcctctcccgcgaccgcgcgagcttcgaggtgcgtgacgttcactacacgcactacggccgcatgtgcccgatcgaatcgccggaaggcccgaacatcggcctgatctcctacctcgcgacgttcgcgaagatcaaccactacggcttcatcgaggcgccgtacagaaagatcgacaaggcgaccggccgcgtcactgacgaggtcgtctacatgaccgccgacgtcgaggacgagtacatcgtcgcgcaggcgaacgaaaagctcaacgaggacggcacgttcgtcaaccgccgcgtacttacccgctacaagggcgaattcatcgaggtcgactgcgagcgcgtcgattatatggatatttccccgcgcatggtcgtctccgtcgcgacggcgatgatcccgttcctcgagaacgacgatgcgaaccgcgcgctgatgggcgcgaacatgcagcgtcaggctgttccgctgatccgcactgagtcgccgatcgtcggcaccggcatggaatacaaggcgggcgtcgattccggtgtctgcgtgctgtgcgagcgcgccggcgttgtcaagagcgtcagcgcggaccgcgtccgcgtcacggccgacaacggcgatatcgacgattatgtcatcacgaagttcatgcgctcgaaccagagcacgtgcatcaatcaggtgccggtcgtcaaccgcggcgaccgcgtcgaggtcggcgacgtcatcgctgacggcccagccatcaaaaacggtgaaatcgcgctcggcaagaacgcgctgatcggctttatgacctgggagggctataactacgaggacgccgtcctgctcaacgagaagatcgtgcgcgacgacgtttacacctccattcacatcgaggagtatgaaatggaggcgagagatacgaagctcgggcccgaggaaatcacccgggatatcccgaacgtcaacgaggacctgctccgcgacctcgacgaccgcggcattatccgcgtcggcgccgaggtgcatgccggcgacatcctcgtcggcaaggtcacgccgaagggcgagacggagctgacggcggaggagcgcctgctgcgcgcgattttcggcgaaaaggcgcgcgaggtgcgcgatacgtcgctgcgcgttccgcacggcgagtacggcacgatcgtcgacgtcaaggtctttacgagagataacagcgatgagctcagcccgggcgtcaacaaggtcgtccgctgctacatcgcgcagaagagaaagatttcggtcggcgataaaatggcgggccgccacggcaacaagggcgttgtttcccgcatcctgccgatggaggagatgcccttcctgcccgacggcaccccgctcgacattgttctgaacccgctcggcgttccgtcccgaatgaatatcggacaggttctggaggttcacctcggcatggcggcgaacgcgctgggctggaagattatgacccccgtgttcgacggcgcgcacgaagaggacatccgcgagtgcttccgcatggcgggcatcagcgaggacggcaagttctggctgcgcgacggcagaaccggcgagtatttcgacaacccggtcactgtcggctacatgtactacctcaagctgcaccacctcgtcgacgataagatccacgcccgctcgaccggcccgtacgcgctcgtcacgcagcagccgctgggcggcaaggcgcagttcggcggccagcgcttcggcgagatggaggtctgggcgctcgaggcttacggtgccgcatataccctgcaggagatcctgaccgttaagtccgacgacgtggtcggccgtgtcaagacgtacgagtcgatcgtcaagggccagaacgtgccgaagccgggcattccggagtcgttccgcgttctgatcaaggagctccagtcgctcggccttgacatcaaggtgctcgacaagaacgacgaggagatcgacctgcgccagagcttcgacgatgacgacgatatcggcctcacgccgagcgacccggtctttgacgaggagacggtcgaggacggcgagatggacggctactccatcgaaaacgaggacggggaagaggacgatttcttctcctcggacgacggctttggtgccgacgaagatgacgaagatctgttccagatcgacgacgacgaattctaatttcggggggtttataaatggaatttaatgtctttgaatcaatcaagatcggccttgcttctcccgagcagattcgctcctggtcttacggcgaggttacaaagccggaaacgatcaactaccgcactttgaagccggagcgcgacggcctgtactgcgagcgcatttttggcccgcagaaggactgggaatgccactgcggcaagtacaagcgcatccgttttaagggcaagatctgcgagcgctgcggcgtcgaggttacgcgcagcaaggtgcgccgcgagcgcatgggccacatcgagctggccgcgccggtttcgcacatctggtattttaagggaattccgtcgcgcatgggtctgatcctcgatctttccccgcgcattctggaaaaggttctttacttcgcgctttatatcgtcaccgatcccggctcggtccgcgagctttcgaagatgcagacgctcaccgagaaggaataccgcgatatgcgtgagaaatatgaagatgacttcgaggcgtcgatgggcgcggaggccatcaagaagcttctcgccgacatcgactgcgagaagctcagcgaggagctgaaagcggatctcgagaccgcgcagggccaaaagcgcgtgcgcattctcaagcgcctcgaggtcgtcgaatccttccgtatctccggcaaccgcccggagtggatgatcctcgacgcggtgccggttatcccgccggatatccgcccgcttgtccagctcgacggcggccgctttgcgacgagcgatctcaacgacctgtaccgccgcgtgatcaacagaaacaaccgcctcaagaggctgctcgagctcggcgcgccggacatcatcgtgcgcaatgagaagcgtatgctgcaggaggctgtggacgccttgatcgacaacggccgccgcggccgcccggtcaccggcccgaacaaccgcccgctgaaatccctttccgacatgctcaagggcaagcagggccgcttccgccagaacctgctgggcaagcgcgtcgactattccggccgttcggttatcgtcgtcggcccggagctcaagatgtaccagtgcggtctgccgaaggagatggcgctcgagctctttaagccgttcgtcatgaagcgccttgtcgagacgggcgccgtcggcaacatcaaggcggccagaaaggccgtggagcgcgcgaagggcgaggtctgggacgcactcgaaatcgtgatcaagaaccacccggtcatgctgaaccgcgcgcctacgctgcaccgcctcggcattcaggcgtttgagccggtccttgtggagggccgcgcgatcaagctgcatccgcttgtctgcaccgcgttcaatgcggacttcgacggcgaccagatggccgtgcacgtgccgctttccgcggaggcgcaggccgaggcccgtttcctgatgctggctgcgaacaacctcctgaagccctccgacggccgcccggttgcggttccgtcgcaggatatggtgctcggctcctattacctcacgctcgacaaggacggcgagaagggcgagggcaaggtgttccgcgacatggacgaggccctgatggcctacgacgcaaaggtcatcacgctgcactcgaagatcaaggtgcgccgcaccgtcgaggtggacggcaagacgtataccggccttgtcgacacgacgatgggccgcatgatcttcaaccgcccgatcccgcaggatctcggctttgtagaccgttcgaagccggaaaacgcgctgaaattcgagatcgacttcctcgtcggcaagaagcagctcgggcagatcatcgacaagagcattaaaaagcacggctccgccatcacctccgaggttctggatgcggtgaaggcgcagggctataaatattccacgatcggtgcgatcaccgtcgcagtctgcgacgcgacgattccgccgcagaagaaggagatcatcgcggcggccgaggcggagatcaacgcggtcaccgaagatttccacgacggcttcctttccgacaacgagcgctacaacgcggttctgaaaacgtgggagaaggcgacgaacgacgtcacgaaggcgctgcagcaggggcttgaccgctacaatccgatcttcatgatggccgattccggcgcccgcggcaccatgagtcagatccgtcagctcgccggcatgcgcggcctgatcgcgaatacgtccggcaagacgatcgagattccgatcaaggcgaactaccgcgaaggcctcaacattctcgaatactttatttcctcccgcggcgcccgtaagggcctcgccgacacggctctgcgcacggcggactccggttacctgacgcgccgtctggtcgacgtttcgcaggaggtcatcatccgcgaggacgactgcggcacgaccgagggcctcgaggtctttgagattaaatcgggacgcgaatcgatcgagccgatgaaggagcgccttgtgggccgctaccttgtcgaggattactgcgatgaggacggcgcggtgctcgtctcgaaggataaaatgatggatgacaaggatgcggatacgattgtcggccgcggcacggagcgcatcaagatccgttccatcctcaactgccgcgcgaagcacggcgtctgcaagaagtgctacggcgcttcccttgcgaacggcgagccggtcacggtcggcgaggcggtcggtatcatcgcggcacagtccatcggtgagccgggcacgcagctgacgatgcgtacattccatacgggcggcgtcgcgtcggccgaggacatcacgcagggtcttccgcgtgttgacgagctcttcgagagccgcaagccgaagcatctcgcgatcatcgcggagatcggcggcacgatcggcttcgaggaggtcaagcgcaaccgtcacgtcgtcgtgcgcggcgagaatgaccagagaagctacctgatcccgttcggcgcgcgcctgagcgttaaggagggcgacgtcgtcgaaaagggcgcgcacctgaccgagggctccgtcaacccgcacgacgtgctcgcgatcagcggcccggaggcggtgcaggactacctgattcaggaggtgcagcgcacctaccgcatgcagggcgttgacatcaacgacaagcacatcgaggttatcgtgcgccagatgatgcgcaaggtgcgcatcgaggacgcgggcgacacgccgctgcttttcagcacgctcgtcgataagaacgaggtgctcaccgagaacgagaagatcgccgcgcgcatcgcaaacggcgagaccggcctgcgcgaggcggtttacacgccgacgctgctcggcatcacgaaggcctcccttgcgaccgagtcgttcctctccgccgcctccttccaggagacgacgcgcgtgctcaccgacgccgcgatcaagggcaaggtggacccgctgctcggcctgaaggagaacgtcatcatcggcaagctgattccggccggtacgggcctcccgtgctattcgaatgtggagatcgcgccgaacatgcccggcagctccctgagccccgaggcgatggcggcgctgagcgcctacgaagaatccgcaaaagatgacgccgagggcttgacaaacgaataagcttcggtatataatgtcaaatagtgtgcttcggctgagaaaaccgcagggtttgtgccggaagcacccgaaaaaagcataaaacagagcctgtccgcacgaaaaaagcgcggacgggatactgttttgtatatctgtttgttttgcggggcaatatagccctgtataacatatagcaattatgcaaggaggtgcaatatgcctacatttaaccagctgattcacacaggccgcgctgtttccgagaagaaggcgaaggcgccggcactgctcaagggttggaactccaagaagcgcgttgcgatcgatcaggattccccccagaagcgcggtgtctgcactgccgtgaaaaccgctaccccgaagaagccgaactccgcgctcagaaagatcgccagagtccgtctctcgaacggtatcgaggtttccgcttatatccccggcgttggccacaacctgcaggagcatagcgttgttatgatccgcggcggtcgtgttaaggatctccctggcgtgcgttatcacatcatccgcggcacactcgatgctcagggcgttgcgaagcgtatgcaggcgcgttccaagtacggcgcaaagagaccgaaggcaggcgcagcgaagaagtaatcttcgcaaaaattcgttacacaaagaactttgaccggagaagcgagagcttcaaggtatttatcatagatagcttcgattattctgcgtaaataccttttcttagccggcgggagcttgtgctttcgagtaccgatgaattcattatttcatgtgaaggagggaagactatgccaagaagaggcagtatagcaaaacgcgatgttttgccggatcccatgtacaattcgaaactggttacacgcctgatcaacaacatcatgtatgatggcaagaagggcgtagctcagaagatcgtttacgacgcattcgagatcgttgcagaaaagacgggcaaggatgcgctggaggttttcgagcaggcgatggaaaatgttatgcccagccttgaggttaaggcccgccgtgtcggcggcgccaactatcaggtcccgattgaggttcgtccggagagacgccagaccctcggcctgcgctggatgacgaactactccagacttcgttccgaaaagacgatgaaggaaagactggctgctgagatccttgacgctgtaaacggtgccggcggcgccgcgaagaagcgcgacgatacacataagatggccgaagccaacaaggctttcgcacactacagatggtaatcgacctgtattcgttttaaggaggattttatggcccgtcaggtaccacttgaattaacaagaaatatcggcatcatggctcacatcgatgccggtaagacaaccacgacagagcgtatcctttactacacgggcgtcaactacaagatcggtgagacacatgatggttccgccacgatggactggatggcgcaggagcaggagcgcggcattacgattacatctgctgcgacgacgtgcttctggccggacagaaacggcaagcagaaccgcatcaatatcattgacacaccgggccacgttgacttcacggtcgaggttgagcgttcactccgcgtgctcgacggctccgtcacggttttctgcgcgaagggcggcgttgagccccagtccgaaacggtttggcgtcaggctgaggaatataaggttccgcgtatggcctatgtcaacaagatggacatcatgggcgccgacttctaccgcgtcgtgcagatgatgaaggacagactcaagtgcaatgctgtcccgattcagcttccgatcggcagcgaggacacctttaagggcatcatcgacctcgtggagatgaaggcctatgtctactacgacgatctcggcaaggatatccgctgcgaagagatcccggaggacatgaaggagatcgccgagaaatatcacgtcgaaatggtcgagcatgttgccgagcaggacgacgacatcatggataagtatctcatgggcgaggacatttctgtcgatgagatcaaggactgcatccgcaaggcgaccatcaacaacacgatggtgccggtgacctgcggtacttcctacaaaaacaagggtgttcagaaacttctggacgcgatcgtggactatatgcccgcgccgacggacgttccggctatcaagggcgtgaatcccgatacggaggaggacgatgtccgtcactccaccgatgacgagccgtttgccgcgcttgcgtttaagattgcgacagacccgttcgtcggtaagctgtgcttcttccgcgtgtactccggtacgctgacggcgggctccgcagtttacaactccacgaaggacaacaccgagcgtatcggccgcatcgtgcagatgcacgccaaccaccgtcaggatatcgaaatggtttatgccggcgatattgcggctgcggtcggtctgaagaacacgacgaccggcgacacgctctgcgatgaaaagcacccgatcatccttgagtctatggagttcccggagcccgttatccgcgttgcgattgaacccaagacgaaggccggtcaggagaaaatgggcgtcgcactcgcgaagctcgccgaggaggacccgacctttaaggcatatacggacgaagagaccggccagacgatcatcgcgggcatgggcgagctccacctcgagatcattgtcgaccgtctgctccgtgagttcaaggtcgaggcaaacgtcggtaagccgcaggttgcctacaaggagacgatccgcagaaacgcggacgtcgatacgaaatatgcccgccagtccggcggtaagggccagtacggtcacgttaagatccgcattgagccgaacccgggcaagggctacgaatttgtcaacgctgttgtcggcggcgctgttccgaaggaatatattccggcggtcgatcagggtatccagggcgcaatgctctccggtgtcctcgcaggctacaacgtcgttgatgtcaaggtcacgctgtacgacggctcctaccatgaagtcgactcctctgaaatggcgtttaagatcgccggctcgatggccttcaaggaggccatgcgcaaggcggatccggtcctcatggagccgattatgaaggttgtcgtcattgttccggacgagtacatgggcgacgttatcggcgacctgaactcccgccgcggcatgatcctcggcatggatgctattccgggcgcacagcagatcaacagcgaggtgccgctctccgagatgttcggctacgcgaccgacatgcgctctaagacgcagggccgcggccagtacagcatggagccggctcactactccgaggttccgaagtctgtttctgaaacgatcatcgcttccagaaaaaaggcggaataatcggaaataccacttgatttttcggcgctttattgctacaatgaagctaaacctaaaacccattttactgcataaaaggaggcaattccaatggcaaaggctaagttcgaaagaaataagccccatgtaaacatcggtacaatcggtcacgttgaccacggcaagacgaccctcacggctgcgatcacgaaggttctggcgcttcagggccaggcagagttcgaggattactccatgatcgacaaggctccggaagagagagagcgcggtatcacgatcaacaccgcgcacgtcgagtatgagacggcgaaccgtcactacgcgcacgttgactgcccgggccacgccgactatgttaagaacatgatcacgggtgctgcacagatggacggcgcgatccttgtcgtttccgctgctgacggcccgatgccgcagaccagagagcacatcctgctctcccgtcaggttggcgttccctacatcgttgtcttcatgaacaagtgcgatcaggttgacgacgaagagctcctcgagctggtcgagatggaaatccgcgacctcctcaacgagtatgatttcccgggcgacgatacgccgatcatcaagggctctgcgttcgttgcgctggacagcgcttccaaggatccggctgctccggagtacaagtgcatccacgagctcatggacgctgttgacgcttggattccgacgccggagcgcaagagcgacctgccgttcctgatgccggttgaggacgtgttcacgatcacgggccgcggcactgttgctacgggccgtgtggagcgtggcgttctgaagatgtccgacgaaatcgaaatcgttggtctgaccgacgagagaagaaagtccgtcgttacgggcatcgagatgttcagaaagctcctcgatttcgctgaggctggcgacaacgtcggcgttctgctccgcggcatccagagaacggatatcgagcgcggtcaggttctggcgaagccgggcaccattcatccgcacacgaagttcaagggtcaggtctacgtcctgacgaaggatgaaggcggccgtcacaccccgttcttcaacaactatcgtccgcagttctacttcagaaccaccgacgttacgggcgttatctctctgccggaaggcaccgagatgtgcatgcccggcgataacgtcgtcatggacgttgagctgatcaccccgatcgcgatcgaggaaggcctccgtttcgctatccgtgagggcggcagaacggttggttccggcgttgttaccgcgatcaacgagtaattgacgtttcaaaactaaaaatccatcattttcttcggggcgaggtgcaattcctcaccggcggtgaatgcctttgcatgagcccgcgaccgcttttaagcgctgatccggtgtgattccggagccgacggttacagtccggatgatagaagaaacgtgaatcaaaagattttcggcgtcccgcgtgttttccatgcgggacgtttttttgattctccccgcgtttctgtaatttttacagaaagggttctgatttttatggcaacaaaaaccgtgcaaagcgcccgtgcaaatacccgcagaattgcgatgacggcggttttggccgcagcggcctccgtgctgatgttcatcagctttaagctgccgtttatgccgagctttatctcactcgatttttccgaactgcccgccttgctcgcggccttcacgatggggcccctcagcggcgtggcggtctgcttcgtgaaaaatctcgtcaacctcacgcagtcgatgacgggtggtgtcggcgaactttcgaatttcatcatcggctcggcctttgtgattcccgccggcttgatctaccgcaggcaccgcagctttggcggcgcggcggccggcgcgctgctcggcgcggccctgatggctgtgctcagcctgttttcaaactactatgtcgtctacccgatttacacaaacatcatgtccatggatgcgattctcggcatgtaccgggcgatcaatccgggcatcgaaaatctctggcaggcgctgctcgtgttcaacgtgccgttcacgttctgcaaggggctgatcagcgcggcggtcacgctggccgtctacaagaagctcgagccggtgatcaatggccgggcgctgtaattgtgcaggttatcggatttctgcgccgcatttcggtgagatttccatgttttgtgccttgcgcaatttgacgaattgtgctatactgatcacaaatcaaatgaatatgcccttatcaagagcgacggagggaacaggccctttgatgtccggcaacctgcattttttgcaaggtgctaattcctgcggcatggcaatgccgaaagatgaggattgcgaaccgctcatcttttgttgagcggttctttattttccgaaaattccttgtgtggggcagcagaaaggaagcgtttttatgaacacgaacagacatcttttcacctcggaatccgttacggagggacatccggacaaggtgtgcgaccagatttccgacgcgattctcgatgcgattctcgcaaaggatccgacggcgcacgtggcctgcgaggtgacggcgacgacaggcatggtgcacgtgatgggcgagatttcgacggagtgctacgtggacatcgactcgattgcgcgcggtgtaatcaaagaaatcggctacgattcgccggacgccggcttcaacggcgcgacctgcggcgtgctgacctcgatcgacatgcagtcgcccgatatcgcgatgggcgtcaacgagtcgcttgagacgaaaaacggcgcggctgatcaggacgacctgaccggcgcgggcgatcagggcatgatgttcggctatgcctgcgacgaaacgccggagctgatgccgatgacgatctccctcgcgcacaagctcgcgaagcagctcgcgaaggtccgtaaggacggcacgctcgcttacctccgcccggacggcaagacgcaggtgacggcggaatacgagggcgacaccgtgaagcgcatcgatgcgatcgtcatctccacgcagcacagcgaatcggtttcgctcgagcagatccgccgtgacatggtcgaatacgtcgtgaagccgatcgttccggccgagctgatcgatgaaaatacgaagtattatgtaaacccgacgggacgctttgtgatcggcggcccggtcggtgacagcggcctgaccggcagaaagatcatcgtcgattcctacggcggcgtgggccgccacggcggcggcgcattttccggcaaggacccgacaaaggtggaccgctctgcggcctacgcggcgcgctatgtggcgaagaacatcgtggcggccggcctcgcgaagaagtgcgaggtgcagctcgcgtatgcgatcggcgttgcgcatccggtttccgtgatggtggacacgttcggcaccggcacggcggcggataccgcgctggccgcggccgtgcagaaggtctttgacctgcgcccgaacgcgatcatccgcgagctcgacctcagaaagccgatctaccgcccgctcgccgcctacgggcacatgggccgcgaggaactcggcgtgcgctgggagcgtaccaataagaccgaggcgctgaaggccgcgctgtgagatgctgaaccgaaaacacccgccgggcatagaatggctcggagggtgtttttgcgtttcggccgggcgcgcctccgccgaagccggcccgatttttcggaaggttgggtgatcgaattggaaccgatcgtgatcgtactgttctgcatgctggcctgctgtgttgtgacggcggcggtcaaggccgtgagcctgtggctgacaaaatcgcgcctgctgcaggaggaggtgccgtttacggtttatgtgacggcgaaaaatgccgatgaggccgagtacgtggtgcgcagcgcgatggagcgcatccgctggctcgatctcagcggtatgtgccgcatcgtctgtctgaatcccgcgggcgacccggagatcgaggaaatctacaaaaaacttatccggaaatacccgtttaccgaaattggggctttgcaaacgcgaaaagatgttctataataaaggtatcaattagaaagaggaagatcgctagtgccgaacgaaaaaaagcagctgctcgaaatggagggcagcgtagaaaatatcgtctaccacaacgacagcaaccaatacaccgtgatggagctgagcagcggcgatgcgctcgtcacggtggtcggcacatttccgtacataagcgtcggggagaagctgcacctgtacggcacgtggacggcgcacgcgaccttcggcgagcagtttaaatccgaggcgttcgagcgctcgcgcccggaaacgacctcggcgatgctgaaatacctctcgagcggcgcggtgaaggggatcggcgcggcgacggccgggaaaattatcgcggcgttcggcgacgacgcgattgacgtcattgagaacgaccccgagcgcctagcgacgatcaagggcatcacgctgaaaaaggcgcgggagatttccggcgagatgcagcgcgtcaacggcatccgcgacctgatggcgtttctcggcagcttcggcgtgcgcccggaggacgccgtgaaggtgtggaaggcgtacggcgcggattcggtcgcctgcattcaggaggacccgtaccggctgtgcagcgataagatcgcggtggaattcacggtggcggataagctcgcggagtcgctcgagtacgacagggcgaatgtggagcgcgtcaaggctggcgtgctgtatgtgctgcggcacaaccttttgaacggtcacacctgcctgccggccgacaagctctgcaccgccgcggcgcaaatgctcggcgtatcgctcgaggacgcgcaggcggcgctttacgcgctctgccgcgattttgagactgtgtgcgagaacttcagcgggcgggatttcatcttcctgccgaagcagcaccgcagcgaggtgtacagtgccgaccgcatccgcatgatgctgaaatacccgccgcagtcgatcgtcggcatcgaccgcgagatcgaggagatcgagcgcagcgagggtatcgagtacgcgcagctccagaaggaggcgatccgtgccgcgctcgacaaggggcttttgattctgacgggcggaccgggcactggcaagacgacgacgctcaatgcgatcatccgtattttgatggagaagggcgagcaggtgtttcttgcggcgccgaccggccgcgcggcgaagcgcatgtcggagctgacggggcaggaggccaagacgatccaccgcatgttacaggtggattgggacgaaaacgacaacccggtgttccagcgcaacgagcgcaacccgctcgagtgcgacgcggtcgtgatcgacgagctctcgatggtcgacgcctatgtgttcgagagcgtgctgcgcgccctgccggtcggctgccggctgatcctcgttggggacagcgaccagctgccgagcgtcggcgccggcaacgtgatcggtgatctgatcgcttccggcgtttttccgacggtgcagctcagcgagatcttccggcagtcgatggagagcctgattgtgacaaacgcgcaccgcatcgtgggcggcgagatgccggtgctcaacgtgcgcagcagcgacttctttttcatgccggcggaggacgcgcgcgcggtgtccgagctggtgctttccctcgccgtcacgcggctgccgaagagctacggctattcgcctgtggcggacattcaggtgctctgcccggggcgcaagggggagatcggcactatcgagctgaataagcggctgcgcgagcgcatcaacccgcaggcgaaggataagccgcaggtttcggtgaacggtgcgctgttccgcgtcggcgacaaggtgatgcaggtgaagaacaactatgacctgccgtggagccggccggacggcacgagcggcgagggtgtttacaacggcgatatgggcatcgtgacggacatcgaccgcgcagcgggctgcatgcgcgtgctggtggacgaccgcgaggtgctctatgatttcgagcacgccgcggcagagctggagctcgcctatgcggtgacggtgcacaagagtcagggcaacgaatttacggcggttatcatgccggtgtttccgggcgcgccgcagctcagctaccgcaatctgctttacacgggcatcacgcgcgcgaagaagctcctggttctcgtcggccgccgcagtgcggtcgccgatatggtggcgaacgaccggaaaacgcggcgcttctccggtctgatgcgctttctgaccgagaaagtaccggagaagggggaagcatgaggcggcttttaaatcgggtgctggcgtttttctttccgacgcgctgcctgctctgcgggcggcccgcggcggtcgatgcggatttcctctgcgcagactgcgccgcgcggcccgtagagcgcgtgtaccgctgctttgcgctgcgcgtgcggcgggagatgtacacgctcgagtgccgcgcgccgatgcggtaccgggagcctttccgctcgacgctctggcgcttcaagttccgcggggagacaagccttgccttgccgctcgccgggctgatggcgcgcgtgctggcggacgaggcagcgcagtacgactgcatcgtgccggtgcccgtttcggccgagcgcctccgggaacgcgggtacgaccagtccaagctgctcgccgagcggcttgcggcgcagacgggcttgccctgccgctgcctgctgcggaaaacgcgcgacaaccgcacgcagcatcggctgacggccaaggaacgtgccgcgaatgtgcggggcgcgtatgcctgcggtgaggcggacagcctgcgcgtcctcctcgtagacgacattgtgacgaccggcgccacggcgcgcgaatgcgccgccgtgctctaccgagccggcgcggccgaggttctgtgcgtctgctgtgcggttgtcgaagcaaattcgacgcaataaccttgcaaaacacgctgtaatccggtacaataagtgtaataagctggaaaaagatcctgcttttgccggggagaccaatggcggtgcggcgaataaaacgaacggagaagaaaagccgatgatgggtacagatattgcaatcgatttgggcacagcgaatttcaggctgtttgtcgatgggcgcggcgtggtggtcaacgagccgaacgttgtcgcggtggatacatataccgaccgccttgtcgcaatcgggcgcgaggcgtacgagatgctggggcgcacgagcgaccgcgtgcgcgtcataaagccgatgagcggcggcgtgatctccgatttttctctgatggacgcgatgctgcgccattatatgaagcaggtgagcacgagccgcgtgttcatgccgcgcgtcgtcgttacggtgcccagcggcatcaccgaggtggaaaagcgcgcggtcgtcgatgcggttgcggcaaacggtgtgcggaagatctgccttttagagggaccggccgccgccgcgatcggcgcgggcatcgatatcacgcgcccgcgcggcacgatggttgtcacgctgggcgcgggtatgagcgatgcaggcgtggtctcgatgaacgggctcgcggcttcgcggtcgattcccgtcgccggcgaagcgttcaacgaggcgatcatcaaatatgcgcgccggaagctggatcttgtgatcggcagccgcacggcggaggcggcgaagcgcgccgtgggctgcgcctacccgatgaagcagatcaagacctgcgtgctcaaagggcgcgacgtgcagtccggcctgccggcaaaggcggagatcacctcagatcagcttttagaggcggtgcttgagccggcggcggaggtggtgcgcatgattcagaccgcgctggaggagacgccgccggagctgatggcggacgttgcgggcgaggggattttgctcgcgggcggcggcgcgtacctcagcggttttgaccggctgcttgcgaaaaagacgaagatgcgcgtgcgcgtgctcgaggagccggaaagctgtgtgatccgcggcgcgggcagcgccgtgaagatgatcgacaaggctaagtttgacccgaaaaacggcagccgcgcgacgcctctgatcgcgtattactgattggacggcccggcgggcggggaaccggcgctgggaaagcggagcgcgcgtttacggcggccgcaggcagtgtgattcggatacggggcaggccttgtgccgggcgattataagagaaaataaagcggcggtgcagccctctgtggagcgcaccgccgcttcggcatttctgaaatttacatggaggtcggcacggtgatgttgaacatcgtcagcacattgcgcagtacggaagccgtcgcgcggcagaccgtgaggcgcgcctgcatcaggccctcggcctcgcccttgacgcggcaggcgttgtagaacttgtggaacttcgtggcgagctcgatcacgtagcgcgtgatacgcaccgggtcgtaatccttggccgccgcgatgatctcatcggtgtactcggcgatgtggcggatcagttcgatctcctcgggcgcggtgagctgcgcgagttcctcggccgtgcagtcgcgcggggtgatgccgtccgcctcgagtgcacgcagaatactgcaaatgcgcgcgtgcgcgtactggacgtagtagaccgggttctgcgcgtcctctttgacggcgacgtcgaggtcgaaatcgagcaaggagttggcctcgcgcatgttgaagagaaagcgcgcggaatcgaccggaacctcgtcgagcaggtcgccgagctggatcgccttgccggtgcgcttgctcatgcgcacgatttcgccgttgcgcatcaggcgcacgaactgcatcaggatgatctcgagcttgtccgcgctctggccgaccgcgtccatcgcgcccttcatgcgggccacgtggccgtggtggtcgctgccccaaatgtcgatgagcaggtcgaagccgcggtcgaacttattcttgtggtaggcgatgtccgccgtgaagtaagtcgggttgccgttggcgcggacgagcacctcgtccttttcgccgccgaattcggtcgctttgtaccagacggcgccgtccttctcgtaggtcaggccgcggtcgcgcagataatcgacgacggccatgacctcgccgctcttgtgcaggtcgctttcgaggaaccagcggtcgtaatggacgcggtatttctccatgtcggccttcattttcgcaatgttgcgcggcaggccgaagccgacgagcgcggcgcggcgctcctcctcggaaacgcgcatcagtgcgtcgccgttgtccgcagcgtattcctttgcgaggtcgaggatatcctcgccgtggtagctgtcctcgggcagctcgggcgggttttccgcgaaaagctgctggtagcggatcgagagggagaggccgaatttatcgagctggttgccggcgtcgttgacgtagaactcgcgccacacgtcgtagcctgcggcgtcgagcacggcggcgaggcagtcaccgagcgcgccgccgcgcgcgttgcccatgtgcatcgggccggtcgggttggcggagacaaattccaccatgacgcggcgtttcttgccgaaatcgctgcggccgtaatttttgccggcggtgagcacgtctgtcagcacgtcgctgtaaaacgccgggctcaaaaagaagttcataaagccgggaccggctgtttcggcctttgtgaagtacgtgccggagaggtcgaggttttctagaatggccgccgcgatcttctgcggcgcggtgcggaacgcgcgggccgaaaccatcgccgcattcgtcgcaaaatcgccgtgcgtgcggtctgcggggcgctccaccgagaaggcggggatctccgcctgcacgagcgtgccggcggccacggccttttcgagggcgctgcgcacggcggtgctgacctgttctcttgcaatacttaccgcttttgacatagggatgttcctttcggtttgaatttcgttttaaggagcggcaggcgttactggatcgccgtgccgtccggcgtgccgccccgcttcttgaggcggacgatgatgtcgttttcggaggagaggtgcgcgtcgagatcgagcgtatagcggatgcgcagcatgccgccctccgcggagaggtcgtgcttgagcgtctgcgtgaaaacgccgagcgaaagcaggcccgcgccggtatcgtacatgcatttgtggcggcggcccttttcgaggatgagccgtgtcggcgagccggggctcagcatcgtcacggtgccggtcggctcgatcttgagtatctttttgtgcccggtgtagggggcgtcgttatcgtactccatataggagatatatttgacgccgttgcgctcgctgtaatcgccaagcgtgtccagcttgatctcgccggtttcctgctcgatcgtctggcggccgatgatcgtgatttcgtaattttcctgcattttcttcaccttgccctgctgtgcggcaaatttcgtatttttcgtgcggaggcggcgcctccgcacggggatctctcagtatttttcgatgtcgatgcgctcgacctgcccgttgaggttctgaccgagcagcaggtcggcgacctgccggaagccctcgacaaaatcgctgacgcagtagcggtattccggctcggcattctcatcgttcaaaaggccgtctctgcgcagcgtctcgcggcagctcacggcggcctcgcgcccggaatcgatcagtgtgacgccgtgccccatgacgctgcggatcgtggcgctgatgatcgggtagtgcgtgcagccgagaatcagcgtatcgacgccgcgctcgcggatcggcgcgaggtagcgctgggccacaaggcgggtgatctcctcctgcggggcgacaaagccgttttcaacgagcggcacgaagagcgggcaggcctgctcgaaaacctcgatcgcggggttcagcgcaaggatctcgcggcgataggagcccgaggcgatcgtcgcggccgtgccgatgatgccgatgcgcccgtttttcgtctggctgacggcggcctgcgccgtggggcgcagcacgtcgaggtagggcacgggcagcgcgtcgccgatgtcccgcgccgtcgagctgacggtgccgcaggcagcgagcaccaccttcacatcgtgctcgacgagaaagcgcatatcctgcgcggcatagcgccggatggtctcgcgcccgcgcgagccgtagggcacgcggccggtatcgccgaagtagaggatgcgctcgtgtggcagaatgcgcatcagttctttgacggaggtcagtccgccgaggccggagtcgaatacgccgataggtctgttatccataatcaccattctttccttcgaaaataaagccgcttactgtgcgctttttttctcgagtgcgcagtcgatcagcctttcgagcagcgcgccgtagggcaggccgcaggcgtcccagagcttcgggtacatgctgatcgaggtgaagcccggcagcgtgttgatttcgttcagaatgatttttttatccttttcggtcacgaagaaatcgacgcgggagaggccgtcgcacccgagcaggttataggcgcgcaccgcggttttgcggatctcctcggccacttcggggtcgaggcgcgcggggatgtagagctgcgcgacgccgttcttatatttgtcgtcgtagtcgtaaaattccgccgcagcgccgatttctccgatgatggaggcctcgcttttgccgcggctgccgaggacggcgcactcgacctcctgaccggcgatgccctcctccacgacgatttttacgtcgtgctgcgcggcaaggcggatcgcctcgtcgagcttttcgggctccgaaacctttgtgatgccgacagaggagccggcgttcgcgggtttcacaaagaccgggaaattgaggcgcgccagaatcttgttgaggatcttctcgcggttcgccgcgtagcggtcggcatagaaccagaggtagtgcgcctgctcgatgttggcgctcgcgagcagcgagtgggagacggccttatccatgcagatagcggacgcgagggtgccgcagccgacgtaagggataccgcacagctcgaaaaggccctgaatcgtgccgtcctcgccgttcttgccgtgcaggacggggaagatcacatcgagcttgcggaaggcgcaggcgccgcccttttcgaggacgacaagccccgccgtgccgcggtccggcgaaaggaaggccgtgcggttttcgggatgattcacccacgtgtcgttttcaatcgaatcgacgtcaccggtatagagcagccagcggccgtcctttgtgatgccgagcgtcacgatgtcaaatttttccgtatcgaggttgcggagaatggaggaggaggacatcagagaaatctcatattccgaggatgcaccgccaaaaatcacacaaaccgtttttttcacagtaatcaccgttccttgttgaatttttgtcaggaattggttccgcccgtgcggcgggaaaaagtaaaacggccgaaagccgctccaaatcgatgtaggctgtatcgattcagtatagcatattcgtatgcgtttttcaagcgctgatgcacgctttgcgccgcataaacggcaaagcgcgggaaaaactaatcgggaccgcagaacctgcggcaaatatggaaaccggaaaggattgcgatgacgatgaataagctgaaatgtagcgtggaaacctgccgccacaatcacaacgacctgtgcagcttgcagaagattcaggtggacggcccggccgcgatggagagccgcgaaacctgctgcggctcctatgcggagcgcgcgaagtccgcgaagaacgaagcctcctgcgggtgttcctcggcgagcgagcgcacggacattcattgcagtgcggagcgctgcacgtacaacgaaggcaaaaaatgccgtgcggagcaggtgaacgtcggctgctgctgttcggccccgtgtgtggtcagcgagacggagtgctgcaccttcatgccgcgcgcataaaacagaatttttccagagaaacgggcggcacggctttcggctgtgccgctctttcatttgtgtttttacagaaaatctggtatactggtgtgcggaaagcagcttgcggcaaagggggagaggcgatggatcaggcgcgttttttggcggcgcgggaagcggcgctcaggcggacaagaggcgggcagggcatcggcacgctcgcggaaaaggcgctgcatgcggccttaaaggcatactatgagccggacgccgagagccgggagatcgcgctcggcggctttgtggcggacatcgtcggcgaggaggggatcattgagatccagacgcgcggcttcgaccggctgtgcggcaagctcgaggtctttctggaagcggcgcgcgtcacggtggtgtacccggtcgcggtgcggtggcagctctcttggatcgacccggagaccggcgcggtctcgccgccgcgcgggagcacgaaaaagggcgttccgttcgacgcgctgccggagctctacaaaatcaagccgctgctcccccacccgaattttcggctgcgcctcgcgcttttggcgctgaccgattacaaatacctcgacggctacgggccgcagcgaaagatgcgcgcgacgcgcggcgaacgcgtgccggaggcgctgctcgggcagatcgactgcgtggccccggccgattacctcgccctgctgccggcggatctgcgggcgccgttcacggcggagcagcttgcgaaggccgtgcgccgcccagtgaatcaggcgcgtgccggcgtaaacgtgctgtgtgcactcggcgcgctcgagcgcgcgggtaaatcggggcgcgcttatctgtataatcgtaaaattttataaaatttcctttttttgtattgatttttgtgtaaatatatgctattctataccgatatgtatttggcatgcaaaatccaatgaaagaaaggagaagaaaaaatgacaatacgcgaagaagcggatcagcttctgtacgcctgcggcctgctcgatgtgctcgggcggtacggagagccggttgttaccgggagctgcgccatggacatgatggcgtggcgcgatctcgatctctacatcgtcgggaatgatacggtatctgcgcagtggttcgcgcttcagcaggcggtctgcgatgcgttgcagccggtgaaggcagagctgctgcacgagcacggaaagctgtttttggggctcgaaacggaagtgaccggaacgcgctggaacgtggacatctgggcaaaggaccgcgcggccgcagaggcctcccttgcctactgcgcatacgtccggcagcgcgccgaggcagaccccgcggtgcgcgaggcgatcctctcgatcaaaagcggactgatcgaacgaaagatgtacgggctcggcaaatccccgacccgccactaccacagcgacgaaatctacaccgccgtgctcgaagaaggcgttcgcacagtagaagcgcttctggaaaaatatccgaaataggagaaaagccatcgttcagacaaacggtggctttctttttttgcgttttgctctactgtcggtggaatcgtctgacgctgtggagcgagatccataacaaaaggactgcgttttgaatgcggcgtgaggatgtggtagacaatcataggcgtaaggctgtaatgtgcagcggatctcataaccagttttcaaatagtgtgaaatcgaacatgggaagatgtggcataatcggaaaaatttgcgaaattagaatcagataaaatgagagaaacaaggaataagaagtgatatcggtatctttctgaaaaagaaaatcagagacaaatttgtaaaataagaataatataataagatatgcacttgaaaatcaaaaaatatttgaaaatatccttaaaaacatattgacataagaaaagttattgggtataatgcaatcatagattatgacatcgatgccactaaatgaaaaggaaggggatagaaatgtattgtggaatgtcaaatcacattgggaatctgcatctgctgtccgacgcggtgacacgctcgatcagcccggagaactataagggcgggaaagggtgcggcggtatgtgtgaactggaggatggtacggcgaaatccgccgcgcgcgacctcggaaagggctggaaggtgaatccgttcgtccgtatcgcggccggagagacctttgaaattgctgatatcgcgggaccgggtgcgctccagcatatctggatgacgccgactgggaaatggagaaacaccatcatcaggttttactgggatgatcaggcggagccgtcagtagagtgccctgtgggcgatttcttttgcagcggctggcaggagtattttcagatttccacgctggctgtgtgtgtgaatccgggcagcgcgttcaactgctattggacgatgccatttagaaagagatgccggatcacgctggaaaaccgagcggaggaagaggtcgtctattattatcagatcgattatgcgctgggagaggttccggaggaggccgcgtattttcacgcgcagttccgccgtgtgaatccgctgccctataaggaggtctacacgattctggacggcgtgcagggaaagggccactacgtcggcacttatctggcttggggtgtcaacaacaccggctggtggggtgagggcgaaatcaaattttatatggacggcgaccgtgaatacccgacaatctgcggcaccggaacagaggattacttctgcggctcctacaacttcgaggatccgcatacgcacaggcggtacgtggacttcacaacaccctacggcggcttctatgcagtccggcaggatgagctctataagagccagaagcgttttgggctgtatcggttccacatcacggatccgatccgctttgagagtgacctcaaggtgacgattcaggcacttggctggcgggagggcggaagatatcttccgatgcaggatgatatttcgtcggtggcgttctggtatcagactttgcctgcggcggcatttccaaagctgaagagcaaggacgagctggaagttatctgacggaaaggcgtgggtatgcggaaaatgaggtataagccaaaaattctggttgtcggcagctttgtaaaggatctgatcatttcaagccatcgttttccggatcagggtgaaacggttctcgggtacggatttcaaaccgcttcgggcggcaagggagccaatcaggcgattcaggctgcccggctcggtgcaagcgtcaccatggtgggcaaggtcggcgacgatgccttcggaaaggatctggtagaatcctgcgtacagaatggaatcgattgcagcagggtgatggtggaccgtctgcagccctcctccgtgggtaatgtgcagcttcaggtagatgaaaacggaaaaacacagaaccggatcatcgtggttccgggtgccaatatgacgattacgacggaagagatcagttttttgcaggaggaaatcgggcggtatgacatggttctgctccagctggagatccctatgcaggtgaatgaggcggtcgtgcggtatgcgcacgaacagggcgtgccggttatgctgaattctgcacccgccgatacggtcagccgggagatgctcgcaaagctcgattatatttccccgaatgaatatgaagcggcagaactcacaggaattacgattcgaagaaatggaaaagacgtacatatagaggatgtaaaggatgttatcgaatgcctgctgaagcagggtgtgaaaaatgtcctgatcaccttgggcaccgccggtgcggcattcggcaacgaacgcgaattttacctgatcccgacgcttgatgacatagctgcggtcgatcccaccggggcgggcgattcgtttgtcggcgcgttttccacttttgtgtcgatgggcatcgattataaaacggcggtacgaatgtccaattatgtgggatcgctcacagtttccgcgatgggcgcgcagccgtcgctgccctcactggaacaggtacaggcgctgatccgggaacgtggggaaatggagctgctgctccccgaagaggacggcagcagatgcggataaatttttgggggaggtgaagatgtatgcagcaatgggatctcgatgcgcttgcgatatttgatgaaatggcggtcgccgaggtggaaggctttctcggcacaatcgacaacgcagcgtatattcaggcggcggagcttattttgaaagcgcaggctgcgggcaaccgcgtgcacatcaccggaataggaaaacccgggcatgtttccacatacggtgcctctctgctgtcctctacaggcacgccaacctatttcctgcacgggacagaggctgtgcacggctcctgcgggcagcttgtggcaggcgacgtggtgatcgccatatccaacagcggagaaacggcagagctgaaatccacagtggaggctgtgaaaagcaacggctgttcaattattgccgtcactggaaatcccggctcgtggttggcttctcaggcggcggttcacctgtacgctggtgttccggctgaaggtgaccccctgaacagggcgccgcgcatttcgattctcgcggagaatcttgttatccagcggctcagcctgcttttgcagacctacaggaagctggatccggttcagtatgtcaaatggcatccgggcggtgcgctcggaagactgaggggaggtgaagcacaggcggcagaggcagaagggtgagcgccggccaaaagggagcgcggcccttaaaaaacaggagaaaacggaacctatatcattaattttgaggagtgtatattcatgaatagaagaccaaacgcttcagaaaaagcgaatccttcggttcggcgcagacggccgcggttctttctggtttgcctgatgtgcgtggcgggcatgctgctttcggcttgttctccggccggcgccggttcggatgcttccacatcggacagcactggcgtgtcggtcgattcggcttcggaatccggcgtggatactgggggcgatacggaggccaccgaaacgattacatactgggtaccgctgcattccaatgcagcgcaggtgcttacgacttggaatgacaacgaggtatttcaggagttggagaagcgcacaggtgtgcacgtggaattcatccatccgcctgtagggcaggagcttgaaaagtacaatctgatggtcgcctcccgtgatctgccggatatcatcagctatgagtatccgagcggtgcggacagcgcgattcaggagaatatcgttcgcccgctggatgacctgatggagtacaaccccaacctgcaggcgctgatggacagcgacccggaaatccgcaagcagatgaccacgaacaacggccacatttggggctggggccagtataatctgcaggagaatcagggcgatgaggggcagtattcgatcgcgccgtgggccggcccggctgtgcgtgcggattggctggaggagttgggcatggaaatgcccgaaaccatcgacgactggcatgaaatgctcgtggccttccgggatgagatgggtgcggacgtccctctgattctgccgaaaacaggcagatccggcaactcgatctttgtgagcgccttcggcgtcggctccgaattttaccgcgtgaacgacgtcgtgcagtacggcccgattcaggagggctttaaggaatacctcaccctgatgaaccagtggtacagtgagggcctgctggacccggactttgccgcaacgtcctccgacagcaacttctatgcggaatacctgacgactggccgcgccggcgcgacgacagagacctatcaggatatcgttccgctgtacaactcgctctttgaaaacgacgagggcagtatcacggcggttccgtatcccgtgctgaatgaaggcgacgagctgcacctcggctcggtgtcccctgtagtggagaccggaaacggccgccgagattacctgacgactgccgtttcggatgaccgcctcgaggcgatctgccgctggcgcgacagctggtatacagatgaatccacaatgctgttcaattatggcatcgagggcagaagctacaatatggtggatggcaagccggaattcaccgagctgatcaccgataatcccgacggtctggactatgccgtggcctcgtggaaatacaagctcttctgtggcccgtatatttacaatgcgtttgcaatgcccgatgcacagatcgaagccagctgggcttccatcagcacgtggctttcgaacaacgaccgtgcggagcagatgccgccctgcgcagtgcctgtggagcatgcgaccgagtacagctccattatgacggaagtaaacacctatctggatcagatggtgctcaagtttatcatgggcacagaatccctcgataatttcgatgcgtttgtagacgagatgaagaatctgggaattgagcaggcgatcgagtaccagcagatgggcctcgacctgtacaacagccactgagtttaaacacgaaattcaagagagctgcgcggagggccgccacacgccgctgtgtggcggctttcgtgtcacagtgacttatgtcggaggagatgagaggatgaaatccgggtttctggtgcgcctgcggcgtgatatgggccgaaattgggcgctgtacctgctggccattccaatggttctgttttatatcatattttgctatggaccgatctacgggcagatcattgcctttaaggatttttcaccggcccttggcattatggacagcccttgggtggggctgaagcatttcgaggcatttttcgacagccgtacctgctgggagctgatccgcaacacctttatgatcaacctctacgcgctgatttttggcctgccggcaccgattatttttgctctgctgctcaatgaggtgcgcagccctttgtacaagcgcacgattcagacagtttcgtatctgccgtatttcatttcactcgtcgtggcttgtggcatgattttggaatttacccggcaggacggcattattaacgatcttattgccctgttcggagggaaaagggtctcctttatgctggacccggagtggttctggccgatttacacgattaccgatatatggcaggggctcggctggggcagcatcatttatatcgctgcaatcacgaatatcgaccaagggctatatgaggcggcgacgattgacggtgccgggaggtggcggaagatgtggcacatcacgctgccgggtatccgggagacgatcgcgatcgtatatatcatgaagattggtcaaatgatgagccttggctttgaaaaaatcattctgctctataacggcatgacctatgaaacagccgatgtgatttccagctatgtttatcggatgggcctgatgcagatgaactacagctacagctctgcggttggcctgctcaattctgttgtcaatctggtgcttcttgtcattgcgaacaaggtatctaagcgtctgtttgacaccagcatgtggtgaggggggcgtctatgaaactgcataaaaggagatcggtatttcccttattcaatggcctgcttctcgcactggtcggtctgctctgcctatacccgctgctttacatcgtatttgcctcgctcagtgagccggaccggatcatgaaacatacgggcctgcttttggggccgctgggtttcacctttgagggctacgaactggccttccgcaaccccaatattctgaccggctacatgaatactattttttatgtggtggtgggcacggccctcagcctgatcgtgacggcggccggcgcctttgtcacctcgcgaaaggatgcgcttctggccagaccgatcatgctgggcgttgtgtttacgatgtacttttccggcggcttgattccgcttttcctgcttgtcaacaatctcggcctttacaatacgaggacggcgatcattctggtggggcttgtgaacacatggaacctcattgttatgcgcacatcctttctcggcattcccgattcactggaggaatccgccaagatcgacggcgcgagcccgatgacgatttttacgaggatttacttgcccctttccaagccgatgcttgcgacgatgacgctgttctacggcgttgggaattggaacagctggttcaaccatatgatttatttgcaggaccgggataagttccctttgcagctgatcatgcgggaaatcctgatcgccaacgatatgtcgtccatgacgaatatgagcacggtcggaacctatacaaacgacatgtatcaggtgctggtcaaatatgccgtggtggtgattgcgaccctgccgatcctgtgtatttacccgtttttgcagcggtactttatcaagggcgttatggtcggcgcgatcaaggggtaaaggcgctgcgccgcggaaagcgggcgcgctgtaagcctatgcaaaaaatgaggtgcggggtatgctccgcatctcattttttgccgtgtaccggtggacgtcggatttaaaaatacttttgtatttacactgccggaattgtatgataaaatttaatggaagaaattacatgcagaaaattcatgtctttggggagaatggcttaaaattatggctacaatttatgatattgcggaaaagactggcttttctgcgtccacggttgcgcgggcattaaatggaaaagggtattgcagtccatccgcgaaggaaaaaattctgcgtgcagcacaggaaatcgggtatgtgccgcatcaggctgccaaaacattgaagaataacatcacgaaaaaggtcatgatgtgcataccggacattatgaatccgtactattttgcgatgattcacggcgccgccgtgaccttggaacgtttcggctacagcgtcctgctggaatacacgatgcataacccacagaaggagctcgaggttctcgattccttaaaggggcattttgtggatggcgtcatcttcggctcattcgactatacgccgacgctgattgaggcgatcaagggaacggggctaccgaccgttatcacgagctgctaccagagtccggacggcttcagtggctacgactgcgtctatgtcgaccagccgcgggcggcttgggttgccacgaagcactgtcttgaccgcggtcacaggaaaatcgcttttttgggcggcaatgcgagggagcagaatacccgggagcgctatgagggctataagcgggcgctggaggagaagcagattcagccggataaggcactcgcgctctacgcggattttacgcgggagggcgcgtaccatacggtttccgagtttttgcagcgcggggaaacgtgtacggcggttgtggcctgcaacgatctgatgggtgtgggctgcatcaaggcgtgtgtggactttggtctgcgggtgccagaggatgtctctatcgttgcgctggacaacacggagtattgcctctgtacgagtccggcgatgacctccgtcgacatgctgcaggggcaggtaggggaggaagccgccaattttgtgatggaccgtatcctgaacaaacgaaactaccagaaaaatatggcctttctgccgatcctcgtcgagcgtgaatccgtgcggaagttatgaggagcagaagaaaaagcgggacacttcaccaccgtggagtgtcccgctttgttatatttgtgctttatcagaccttcagctttcggaaattgattttgaggtttcgcgcgctgtgcaggcgggggcctgcggcgccgctgcggtgcgcgtagacgctctgcacgaggccgaagccgaggtacaggcagatcgcgctgctgccgccggcggagaagaacggcagcgtcacgcccatgacgggcagaagcgcgaggcacatgccgatgttcgaaacggattgcagcgcaatcaaaccgaagaagccgaagcacatgcagcgcccgagatcgtcccgcgctttggaagcgacgtagagcacgcgcagcatataaagcagcaaaagcaaaatgatcgccgtgcagccgagaaaacccagctcctcgcccgcgacggagaaaatgtagtcgctgtgctggaatgtcacgtagttcgattcgacgcgcgggccgttgaacagccccttgccggtgagctgcccgctgccgatggaaagccggccctgatactgctggtagccctcgtcgagctgtactgccggatcgtccagattgtagacggaggtgaagcgcttgatctggtattcgctgagcacgaagttccacaggatcggcaggctgacggcgaccagcgcgccgagcagcaggaaataccgcagctgcacgccgccggcgaggctcatgcacaggaacatcgcgaagaaaacgatcgcggcgccgtcgtcgccctgaaaatggcagagcagaaccgggaccgcggcgtgcagggcgagcaaaatcacctgccccggcttttgaatctgcccgcgctcccgcacgacggagatgtgctttgcataggtgagcatgaaaaagatctttacgagctcgctcgtctggaacgtgcgcccggcgatgctgatccacgcccgggcgtccacaccgccgctgccctgcacgctgacgccgaaaaagatcgtgtacagcatcaggaaaacggagaacccgccgatcaggtaccagaaggcggcgaggctctcataatcgatcgtcgaaagcgcgacggcggcgacgaaccccatcgaggtgacgagcagctgcgtctggaaataatcggtatacgtggcgcgcgaaacgctcttgagcagcaaaaggctgaacgcggcgatcgcgagcatcaaaagccagagaattttatcgatgcgccggaaataggcggcgatatgcagaagaaaccggttgcttttcatggtgtgttcatcctatcgaattacggcttaaattacaaatagtatagcacacggcccgcggttcagcaatctttttcaaaattttcacaaacgaaaagaatccctttacgaaagcggcgttttgagctataatcatagcagaaattaaaatctcatattctgtgctttttcggggttcggagaggccgggaaaaacagagatgcagaaaggttggtatcacaatgcttaccgatattgaaattgcccagcagacaaagctcaggcccatcgcggagatcgcgcgggagctcggtgtgcgcgaggaggagctcgagccgtacggccgcttcaaggcgaagctcaacgacgggctttttgcgcgcctcgagggagagccggacggcaagctgattctcgtcacggcgattaacccaacgccggcgggcgagggtaagacgacgacgacggcgggtctcggtcaggcgatggcgaagatcggcaaaaaggcggtcatcgcgctgcgcgagccgtcgctcggtccggtgttcggcatcaagggcggcgcagccggcggcggctacgcgcaggttctgccgatggaggacatcaatctgcacttcacgggcgacatgcacgcaatcaccgcggcaaacaacctgctctgcgctatgctggacaaccacatgcagcagggcaacgcgctcggcatcgaccagcgccgcattctcgtcaagcgctgtgtcgatatgaacgaccgcgcgctgcgcaatgtaatcgtcggcctcggcggcaagatcaacggcgttccgcgcgaggacggcttcatcatcacggtggcgagcgaggtcatggcgatcctctgcctcgcacaggatctcgccgacctcaaggcgcgtctcggccgcatcctcgtcgcctacacctatgacggcaagccggtctacgccaaggacatcaaggccgacggcgcgatgacagcgctccttaaggacgcggtcaacccgaacctcgtgcagacgatcgagggcacgcccgcgatcatgcacggcggcccgtttgcgaatatcgcgcacggctgcaactccgtgcgtgcgacgcgccttgccatgaagctcggcgattactgcatcaccgaggcgggcttcggctccgacctcggcgcggagaagttcctcgacatcaaatgccgcatggcgggcctcaggcccgactgcatcgtggtcgttgccacggtacgcgcgctcaaatacaacggcggcgtgccgaagacggagctttctgccgagaacgtgccggcgctcgagaagggtgtggagaacctgcgtgcccatgtggagaatatgcgcaagtacggcgtgccggccgtcgtcgcgatcaaccgtttcggcaccgatacggacgcggaactcaaggtgatcgacgactgctgcaagtcgctcggcgtggaatacgcgctttccgaggtgttcgcgaagggcggcgagggcggcgtcgcgctcgccgaaacggtctgccgcgtcatcgacgaaaacgagacgcactttgcgccgatctacgagctcgacaagacggtcgaggagaagatcgagacgatcgcgaaaacgatctacggagcggccggcgtcacgttcacgaatcaggcgcagaagtccctcaaggatatcaaggcgctcggcggcgacgcgatgccggtctgcatcgcgaaaacgcagtattccctgtcggataacgcggcgctgctcggccgcccggcgggcttcacgatcacgattcgcgacctgcggctctcgaacggcgcgggcttcgtcgtcgcctatgcgggcgacgtgatgacgatgccgggcctgccgaaggtgcctgcggcagagaagatcgatgtcggcgcggacaacgtgatccacggcctgttctgatatggcggtttatatttcaaactcggtcgccgatacggaggcgctcgccgcgcgtctggcggagaagctgcgcggcggcgaggtgatcgccttcaccggctcgatgggcatgggcaagactgcgttcacgcgcggcctcgtcgcggggctcggcggcggcgacgtcgtctcgagcccgaccttcgcgctcgtcaacgaatacgaggcgcgcctcacggtgcagcacttcgatatgtaccgtgtttccggctgggacgacctctattcgaccggcttcttcgactacctcgatacgggcagcgtgctcgtgatcgagtggagcgagaatatcgacggtgcgctgcccgacgacgtgatccgcatcgacatgcaaaagggtgaagcggaaacggagcgcatcatcgcgatcgacggcatagaattatagctttatccgctgtgccgacgatgtgccgcagagccttctcgaccggctcgagcgattcggcctgcggcacggcgtgcctgtcgcgtactgcgacgatttcgggcacggtgaaaaccacgcgatcctgccgatcggccgcccggcggtgctcgacaccgcgcgctgtaccctgtggtacggcgatgcggatctcattcgatagaaaaggatgaccttatgctgattttggcgcttgattcctcggcgtccccggcgtctgcggcgcttttggaggacggcaggatactttcagaattttatatgaacacgaagcagacgcacagccagacgctgatgccgatggtggaaagcgtgctgcgtctcgcggagcggacgctcggcgacgtggaccgcatcgcggtttccgcggggccgggttcgttcaccggcgtgcgcatcggcgtttcctgcgtgaagggcatggcgatggcgcggaatatcccctgcgcgggcgtttccactctgcgcgcaatggcggagaatgcacgcgggatggagggaatcgtctgcgccgtgatggacgcgcgctgcgggcaggtctacaacgcgatgttccgcgtttcaggcggcacgatcgagcggctctgcccggaccgtgcgcttgcgatcgcagagctttgcgcggaatgcgcgccgtacggcgcgcgtctgctgctcgtcggcgacggggctgagctctgccacaagaccttttcggccttcggcgcgcggcttctgccgccgatgctgcgctttcagcgcgcggcgggtgttgcgctcgcggcggaagcgggagagaccgtggcggcggacgcgctgatgccggtttacctgcgcctgccgcaggcggagcgcgagctcaaaaagaaaaacggacaagcaaaggagaacagcggattatgaaaattgcaatcggttcggaccacggcggcttcgcgctcaaagaggccgtgaaaaagcatctcgaggcgaagggcgccgaggtcgaggatttcggctgctattcggcggacagcgtcgattacgcggtgttcggcgcgaaggtcgcgcactgtgtggcggacggcaaggcgcagtacggcgtgctggtgtgctcgaccggcatcggcatctcgatcgcggcgaacaaggtcaagggcattcgtgcggcgctctgctgcgacgcgcatgcggcggagatgacccgccgccacaacaacgccaatatcctgtgcatgggcggcctcgcggtcagcgaggaaacgggccttgagatcgtggacgcgttcctgcatttcgagtttgagggcggccgccaccagcggcgcatcgaccagatcacggcgattgaggacggcgcgctctgatcccgcgcagcggcttttgacacggggcgcccggatacggtaagaactggaatgagtctgaagccggggctgccggataaaaaacgaaaggtgatggaaatggacaaccagatttttgttatggatcaccctttgatccagcataagctcacgttcctgcgcgataagaacacgggcacgaaggaattccgcgcgctcgtcagcgaaatcgcgacgctgatgtgctatgaggcgacgcgcgacctgccgctcgagaacgtggagattgaaacgccgatgtgcagggcgacaacgaaggtgattgcgggccgcaagctcgcgtttgtgccgatcctgcgcgccggcctcggcatggtggatggcatgctccagctcgtgccgagcgcgaaagtcggccatatcggcctgtaccgcgaccacgagacgcacctgccggtcgaatactacaacaagctgccgccggatatcgaggagcgcgacgttatcgtgctcgacccgatgctcgcgacgggcgggtctgcgatcgacgcgatcgagatcgtcaagcgcagccgcccgaaaagcatcaagttcctctgcatcatcgccgcgccggagggcctcaaggcgctgagcgaagcgcatccggacgtgcacatctactgtgcctccgtcgatgagcggctcaacgaggactgctatatcctgccgggtctcggcgacgccggcgaccgtatcttcggcacgaaataagaaattaagcggcgcgtgcggcaactgggccgccgcgcctttttcggggtgtttgtattggaaaataaaataaaaaacaagagtgtttaccactggctgatcgtcgccgcgtgcagcggcctcgccatggcggcgatcggcatcagcatcaactgcgccgggattttcttcgcggcggtttcggaggagctcggcgtggggcgcggcgatgtttcgctcacggttacgctgacgaatgtcgtgaccggcctcatggggccgctcgtcgcctcgcgcctgttcgggcgcgtcaatatcaaaattttaaccgggattggctccgttgtgacggcgctctgttttgcgggtatgtccgcggcgaagcatatcgccgtcttttatgtgctcagtacgctgatgggcatcgtgatcaccggctacagcaatgtggcgattacatacatcatcggcaactggtttcaggagaaaaacggctttgcaatgggcatcacgatgagctgctccggccttggcggcgcgatcttcaatccggttctgagcgcggcgatcgaggcgttcggctggcgcgcggcctatctcacggcggccggctttgttcttctgctgacgctgccgggcgtgctctttgtcatccgcgagcgcccggaggataaggggcttctgccctacggcgcggcagagagcatgccggctgcggcgggcaggcagattcaaaagggcgcgattgctttcggcagcgcggcgtttctcgtgacagccgtgttttccgttctcgtctacgcagtttcgggcttcaacgcgcacgtttccggctttgccacgagcatcggtcttgcgcctgccgtgggcgcgctgatggtttcggcctcgatgatcggcaacgtggtgttcaagctgctgatcggcgttttgagcgacgcgttcggcgcgcccaaagcgtgcggcgtcatgatgctgctcaatatcatcggtatgaccgtctttgcatttttgccggttggcggcgatgccgtggcgatggcgagcgcctttttctacggcggcatctatgcggtatcggcggtcggtatcccgctcgtcgtgcgttatgtctatggaccgcggctgcacagcgtcgcatattcgtatatctcgctgttcgcgtgcatcagtagctcctgtacgatggccggcttcggctacagctacgacctgttcggcacataccgcgtcggcgttttggcgagcgtcgcggtggcgctctgcgtcgttgttctgattttctttctcaaaaagatccgcacgcccgaagcggcgggacggtagaagcacgaaaggcggtaaaagatgaaagcccccggagtattttaaagctccgggggctttttgccagccgtctaaaccgtgggattgaaccgcgcacgcgaggaaaggcggctgctttcagtccaattccttttcgatgaaagcccacccccgcaggtgcggggaaaagtctttacggcgtcgcaaaatgcttgcagtgagaggatcacccccgcaggtgcggggaaaagagcgtcggtgcagcatgtaccgaacgctttctaggatcacccccgcgggtgcggggaaaagtgctgtatttctcgcagaatggcctagaaaccgggatcacccccgcgggtgcggggaaaagatcacgtgtatctgaagaaaggcgaccgcgtgaggatcacccccgcgggtgcggggaaaagccggacaaagacggagatcggagggaaatccgaggatcacccccgcgggtgcggggaaaagactaaaaggatcccgattttaggccgctttttattggcggcggttcaaatttcattcagttttaaatagagtgcgtgcagcagccggcagtcggcgagggcacggtgtggcgtttggccctcaagagaaagatggctcgttagggtggcgagcttgtaattcgggacgccgaatatctttcggcgggccagactgagaagatcgaggcagcggttctgcggcaggggctttccgtgggccttgcaggccgtgcggagaaacgccatgtcaaaggtgagattgtagccgatcagctgctctgtgccgatgaaatccagaaatgccgggagggcctcggatagagggacgccctctttttccagcattgcctgcgagatccccgtgagatccgcgatggcctgcggcagcactttttctgtgcggacgagctgggaaaaacaggcgtggcattctccgtttaatacccggatagcgccgaactcaaggatctgatccgcgccgttttggagcccagtcgtttccagatcgataatgacataggattccagaggcataccggcggcgcgctttgtgcgctgtgccatctggcgcttggccgcgttgctgaagccgggcttcaatggggattcggtctgcgcgctttgcggcagaggacggcgcatcagctggattccgtcgaagtctacgggcgtccacgtcgtgttgtgcacgcggaagtccattttctgttcgccgttcgttgaaaacaccattgttgcgcggccatttttcaggttctggcagacgcgctcccaaatggcgtcccgcacgcggccgcttacatttccgacgtatacgcccgtgttgatttcacacagccatttggaaagatcaccccgcagtctgggcgggcagtccgtcatggtaattacgacgatggcggctcacctgcctctccgcgagcgtaattgacgccgtttgagaccgtgccgagctggttgtcccagagatagacggcctcctcggcgggcggcgcttcgccatcctccagaaacagccagcggatgtcgtggaccatgcgctctagaatgtggtgctcgaccatggcgtttcgcacggtgcggcgcacgacggcgggcaaattctccgggttctgcgccgccacctcgaaggcgatgggaatggtgacctccgccttgtagagatcggccagatcgtatacgaaggaggaatcatgcccgacgtggacgaagccgagccccggcgaacaacccagcgcggcgatgaccgcgtgtgccagcccgtacagacaggcgtgtgcggcagacagcgcctgattcacggcatcgccggcgaaaaaaacgtcgggctggtaggagcggccgctccacgggacgccggtcgccttggaagcctcgcggtacaccctgcgcatgcggctgccctcgcggccgcgaagctgctgcatggtgagctgggagacgtcctcgccgggaaagcggagctgatacattttccgcaccacggccagatgcttgcgcgtgttgctgacgagctctgcctgccgcagcagaagatttgcccgcgtggtcagcgggcggccgtgcgcgtaatagcgcacgccgtgctcgccgacccacacggcgccgacgccggtatcgcccatcagctccatagctcggtgcgtcacccgggtgcccggccccagaagcagaacggagatggctgcggccggaatatgcacaatcccattttcatccgtcacggtgattgcgccgtcctgacgcccgagcgtgcagtgctccagatacagaaaagtcattcggtcgcgcacctgcggcagggcctgcagttcggggcggatgattcccggcacctcatgcattttgcggtctcctgccgatcacggtcatcaggccgagcccataggccttgccgcggccgatgccctcggtcagcagctttttaaacagctcggcatccgtgaccgcgagcgcgccctcataggtgacggagcggatggaaacggtctgccggctcgcgcccttgtgaaattgcagccagtgcgtgtccacaacagtgaagccgtccggctccagccggaaaccgtgcttttcggcgcggtccagcagccattgcttctggtattccaccgagcagtgggcgtgcacgatgccccggcccggatgcgcggggcccgggcagcttttcgtggggtttgcggtcaggcggaactgccacgtgcttcccgggaggattctgttgagaaggggcgcataatccttcacttcgggcggctgccctgtgccgaattgggcggtgaggctgcgcaggtcgggcatatccgcgctgagaatcaaaaggtagagggtgtttccgagggaatcgagccgccaaagccgccgccttcgctcaccgggaaacgcctgctccacggcgccgtgaatctgctgcggattcacgagagccacggccgtgctgcggcggtgtacgtcgagtgcaactcttgaaagatacatgtcatgcacctccgagttctgcgaatggatcgtgttgtgtcgtgctggatacgggctcctgcggggaaaagcgcagctcctttacggcgcggtagccaaaccggcggtgccgcgggtcgaaggagaggggaagatcccgctggggaaaggcgtttggctccagcggatcggcgtccagcaggatgcacacgctcttttccgaacccagctgcgctgcggaagccaaagcgggctcactgcggagcgattcgacgagatcgatttcccggatgccgaggcacaggggcagcgtgggcgggcaggatcgacggccgagaaacaggggataggcaggggattgcagggcgtccgcaagctgctcgagcagggctctgtccgtgctttccagcccgacgaggaaaacagcgtcggcaaggtagtgacggcgggtgatgtagggcgtttccttgagtttctgctttttctggagcggcgtcagattgccggctgtgtgaaagtcgacgaggaggcttcccgcacggtccgtgcgaacgccgaagcgcagctgattcagcggcgtaagccgttcaggcgcatcgcggcgtattcccaaagccgcggccagcaggccgatcacaccgcttttcgtgggcgcaagagccattttccgcgtatcgaaattggaggcgatgccccatgcctgcatgggtgctgcgaggcgcagcagtaaggtgggcatcattccacctcgcttccgctgagctgtgccttcacggcgtctgcgagctgctcgagcagggcgttcaggcccatcgcgggcgcaagggcgtccagaccggtcccgatgacaaaggcctgaaccggatcaccggtataatcgcggtacatctgctgtgcgtaggcggtgagctgttttttcgagggagcaacgcagccgcttccatcctcggggcggacagcgcgctcgaacgcgccgcagagattgacaggctgatcccggcggactgctacgtaaacggcatccggcagcgtgcggttggcaaaggaattctgcttgccggtgggcatggagcggatgaaagcctccgcaaaggtgcggacggccgccgccgtttcctcggggttcatatgtgcggccagctccatggcgttgacggtcgcgtagcggtagagcgtggaggaattgaattcaatcgtgcccagatggcccgcgcctgcgttttccttcggagagaggtcgtccacggcggtgaagtaatcgtattcggtctgcacagcgtgcgtcgagatcgcgtgcgcgacctgcgcggcggcatcgtaatttaaggacgcgtcggaggcgaccatgcggccgaacagcaccatatcgacggagggggcggccagaacggcggctttgtaggctttggtatccttttcgtcctcggcggccagctttgcaagcgccttggcctgatcccggctcatgaaaaacaaggcctttgcctttacggcgccgctctccttttcggggccaatgtcgacgcccgcgcttttcagggctttttcggcgagctttgcacagttcagcgcggggttcagcagcgcgatttcttccgctaccatttcgacgacgtttttcgtgcgctttccgacctgcgcggggtcgagcagatcctcttcaaataggatccgcatcgcgcgcttccatgcctgcgaagagacgcgcgcccggttgacgccgccgtacacggcggttttggggcttccggtatcgtcccggttcacgcagctgggcggcacggtttgcagcacgtggaaatcaatgtacaggcggtttttattcatcttggagctcctttccggaatcggtgtttgtgttctcattatcttcagacggcatgtgataatagtcctcggcccagcgcaggcgcacccgcggggcagttgcggagaactgcatccagtacaggtcttcggcaagctgcgcgtaatcgagcgggatgccctcccggcgcagaagctgaatgatgccgcgcaggtggtgcgcgagttcctccgcgctggaagctgtggcgagcgcgttgaagcgccggaaaacgctgctttcctccggcgatttctccggggccgccagcttgtggacggcgtagccaagcccgttgccggaccggtgcatgctgctgctctggccttgctggtggagcgcgtaaagcgtcagcgccgtgtaaatcgcccactctgcggggctggctttgccccggtcgctttgcagctccagaggcagatcctgcaaaaatgcgccccacagcgctgggatatcccccggcgcacggccgatgccgcgccgcagattggccagcgtcgccttgttcgggtgctccgggagcgcctgtattttttggatctgcccggctacatagccgtgaatttttctagcgttcattgctctcctccctttggatagattttccgaatttcgttctgaaaccacatgtgggcctttggcgcggagtaataataggtttgttctgccttcgcgccctttttattgccgtcttttttcagtgcgcggccgacaaaggccgcgggaccggcctgctcgaccatctgccgccccagtgcgagcgcggttcggcgggctttttcccgccatgcgaggaggctgcggtcggcttcgtcctcgtcccattccgggtcgatggcgtacagccagtcccgaaatggccggtcgatttgaaaataaaactgctcttttacccggtcggcgtctccgtctcctgcgcctgcggcggctgtggctagatttttcgcgagactggccaacgcaccgcaggctttttgacagttttcgatttcgtcgcggatatgctttttccagcgtactcccagttcatccagcagaagcgcgtggaagaaaatgctgtcctgaaatgtatcgatgacgaagaagtccttgtcgccgtacacggcggagacgacccggaactgggcgatgcggtttctgggaagtgcgccgttcttctgcaattcggtaatccagcgcacgataccgggggagtgaccgtgttccgtatctgcggcaatggcgggaaactgccgccaaagctgctttgcaggatcgtggcggagcggctggtatgtgatcggcgcatttttcttggccggtgcagctttccacagggtcatctgttccgaaaatgcgttttccttttggaagaagtcgccgccaagcagggtgaagccggttacccgctcgttttcgcgcttcagcaacaggcggcgggattgaagcgtgagaagggcggcggcattgtcgggcggtgcgatttcgcatcgctccgcagtgcgaggcagctcaagctcccagcagggcgtcggcgcaccccacagctcggcgccgtcctttaaaagcgtcaggttcagcatcagagtttcgaaaagatcgttaccctgtgcgaagatcaggccgagctttccgagccagcccgcgccgacggagggcaggttcttgcctttcggcttcgcagaggtgtcgtcaaagccgttgacgtacaggagccaccgcgcggcctgcgcataagacatggtgctttgctcgtatccggcgtaggggcggaacagccgccttttgttgctgctttcggaaagctcgccgttcagcttggaagcgccgtactccgttccaatcttggcctcgagcacctgataaaagggccgttcggggtggaacagccagaagcgctctttccagtcgtccagatatttttgaatgggggtttcggggaagcggcgctgtgtccaaagctgcttccagcgttggagtgcctcccggctgtttgtaagtgccgccggcgcgccggtctcatcgacacggtaaaaaaccgcttgcagcacggctagaagcaggcggagcaccgcggcgtcctgcgtcggaagctcgccggcgaggtcgcggaattcatgtgcgcgcagcagcgcctccgtcaaagagacctcctgcacggagcaatccggcatgagcacccgcacccatttttcctcggtcagattaaattctatttcaggcattgtcgtcctcctttctataggtcagcccgtcgtccgggtcgtattgcagcgttgtgtccgccaaatgtgcggtgagcgcctcgtcgagcagcaggatgagctcgcctttgagcagcggcgactgctgccactccgataaaagcagcttgttctgtgcttcaagctcttcgatcgccttgtcgatattccagcgccggctgaaaaaaccgggcaggcggagcctctgccgcgcgatgcacaggctctcctcccgagacggcggcctgtcggcttccacggcccggccgtcctcctgccaagggagaaagtgcacggcgccgtcttttcggcgcatcatcagcaaaacttcgagcgagggatcgccgtcgcgcacggccgcccgggcctgcgcgtcggagcgggcgtttaggtcgtgcatccagtcgtccagcgcatcggacagcgaatctgccggcgataagatcgcaaaggtctttgctcgttctttctttttcccctgctcctcaagatacagcgctttcattttcgcgctttcggcggtttcacagagcgggtcctgctccttccagccgtaggtattctgcacgagtgctgaaatatcgtccggcagtgtgatgcggtcgggcaggagcttccgggtgcgccaaagcagccattcgccgtagacagcccggctgccggggtcggtactcccgtcgccgggcacgagcaccgcacagcgcgcatcttgcagccttttaggccgcatgcgcccggtatgtctgtgctcgcggccgatcctttgcaggagaagatccatggggcagagctcggtcgccatgaaatcgaagtcgatgtcgagcgactgctcgagcacctgcgtgcccaccacaatcagccggttccgctgtgccggcgtggaatgcttgccgaggcgctcgagcagcagtttttccctttctgcgcggtcgggcatgagaaactgcgcgtgaaacaaaataacctcgcagtccggcagggcatttcgcaggataccggcaaaggtctgcgcctttttcactgtgttgaagatcacgccggcgcatccgccgtcctcaagcgcgtccttcaaaagcgccgggagctcgccctcggccgtgacggcgacctccacggatttccgcgcaccggtgagggtgagcgaccgctgccggaccgcgccgccgtctgtccacgtcagaagcggatagccgcggttggcggtaacggaaggctccggcgccatgcagcttaagtaggcggccgtgagctctgcacggcgcgctgccggaagcgtggcggagagtagaatcacgggtaccctgtactggccgagccatgccagcgcccggtgcagatacgtgctcatgtaggcgtcataggcgtgaacctcatcgatgacgacgacttttccagcgaggccgaggtgccggagcataaggtgcttttgctttagagccgccaataaaagctgatcgaccgtgccgacgacaaagttcgcaagcagggcctgcttgttcccctgaaaccagctgtgcacgaatacgccgtcgccgggctcctcgtcgtcggaatgggaggtgccggtaaataattcgcggtacgcctcattcaattcggccatgccgtgtgcgaggcgtatggaatgggcggtgtcctcggactgcgctttggaccaagcggcgagccgggggaagatgccgttggcggtggcctgtgtgggaagcccgaaaaacagcccgcccgcttgaaagcgattcgcgaagatctcggccgcggcgagggcagcctctgttttgccgatgcccatctgcgcctctaaaatcaggaggccgggagtctgcatttcgcgggcggtttccagcgcggcggcttgaacctcgttcggcgaaaaaccgaatttcccgcaaaaatccccggcatccgcgggcggatacaggctttcccacggcggcgtcaggttcagtgcgcgccatgcgccgtccacgcgggccggatagagggcggggtctccggtttcctccgtcgaaatgaggggaaaatagctcgtgttgcttgcgatccagtccgccatgatgagcaggccggtgaagagcagcgcctgcgggacggtcagatcgggcagtgcctccgtggcgggaaagcccgattcttccaatgcggcgtcgaaaaacgcgcgccaaatggaaagccaaagctttttctgtccctttccccagtaggtacggccatagatctccagatgctcgcagacaggatcattcagattgttttcctgcggctttccgtggtgcgcgccggcgatggaggccagccccgcggggcagcccaattccagcagaatggcctcgctggcgcgcgcatgcggcgcagtgtgcggtatagccggcggggtgaggtcgagcacggcgccgatgcgttcccgtacctcgggcagggcatacaggatcttgttctggaacaggaccgcggccttgccgagatcgtggagtgcgccgaggaaataagcggtttcggccgccgcatccatatccatgccgagggcttcgaaggcggagagcggcagccagtttaaggttaggcgccgcgcgatttccgccgtgtcgcgcgcgtgcatccaaaggggcagccacaggccggtgtcagcggggtccgtctttgcggcaagcaggcgcaggacgccgccatttgaaatagatgtcatgtttccaccggctttccgaattatcgcagaaatgaactgcttatattatagcaataaactgatctgttgtcacgctgtttttggtgaatttgcgttaattttgtaaaaatatgggggagcaggcgggtggatagctccaaaaagaaagagagccggccgcccgtgtttgtacggacagccggctgtttttttcgtttgtttgaatgcgcaggccggattttaggcacacccggcggagataatgcgaggggagcggccgatcagagcaggcgcgtatcgttgatgatgagctcaaaggtcaggccgagaaaatcggcggccttgcggcagagcaccatacggtcgagaaagatctcgaaatactccataacggggcagatgcccgtgtcgatcgtgatggagaacacgcagagcttgttttcggcatcaatcttcagcgaggcgttttcgacggcgtagttcacgcggtcgtggatgtcgcttgcgataatcgcattcttgcgcacgcgcgtgcggcggacgtcgctcttgtcggagaggatcagggcggcggaaacggcgttgaccggaaaggccgtcttttcatcgtggtggccgatggccgagcagatcgtcgcgatctcctcgggcggcatattgaggcgggtcaaaagcgtaaaggccatgatcgcgccgctgtgggcgtggtccacgcggttcaccgtgttgccgatgtcgtgcaggtagccggcgatcgccgcgagctcgcaggtgcgcgcgtcgtggccgagcgccgcgaggatgtcgcgcgcgtaattgctgcagcgcttggcgtgcgggcggccgtgttccgtgaagccgagcgcgccgaggcagctgttgccggcctccacgtagatcttagcctccgggttcgaaaaaatatcgtccggcgtgatgtgcgcgtattttgtcataggaatctccgtttctgcgggggatcagtccgccgtgaacatgcggtacatggcctcgaggcagatctgcgcgtgtttcttgtagtgctcgaggttcaagcactcgttgcagttgtgcgcgttcgtctcgtcctcgttgaatgaagcgccgaacgcgacgccgcggccgcccatctggcgggcataggtgccgccgcccatcgaaaagatgtcgcacttttcgccggtcatgtcttcgtaggcgcccgagaggagctgcacgagcgggccgtccttcggcaggtaaagcggcggctcgtcggaatggagcaggtaggtgaggccagcgccctcgaccgccgcgcgcagagccgcgtcgatgtccgcgccctttttaagcgccgggtaacggatgtctacatcgaagcggcccgcgccgttttcggcggagacgaggccgaggttgaaggtcagcgcgccgctcggctcgtcggccatctgcacgccgatcttcgagccgtcccaggtcaggccgatcttttcgtccgcaaagcggaggagcgcgccgcactccgcgccgaaaacggaggcgagcaggcggatcaggtgcgcggcggcgttgacgccgttttccgggcacgaggcgtgcgcggcgacgccgtgcgccgtgatgtgcgcgccgtccgccgtgcgctcgagatcgaaccgaaccgcaccggctgcggccgcctcggaaaggcggctgtattccgcgtcattgcagacaacgtcggcctccgccttgtacggaacggcgttgacgacggtgccggctttaaagctgcggatttttttaccgaccgggccggtcacggcgaagcggaagaggcccttctcgcagtggcacaggccgtagccggcgtcgggcgtgaagcccatcgtgggcatctgctccttcgagaagtagtgggccatgtcctgcatgccgatctcctcggcggagccgagcacgacgcgcagcttgcgcttgccgacgacgcccgcatcgcgcaaagcgcgcaggcagtgcagcgcgacgatcgccggacccttgttgtcggacacaccgcggccgtaggcgtagccgcctcggatcgtcatgtcaaacgggtcgctatcccagccctcgccggcgggcaccacgtcgagatgcgccatgacgacggcgttctcctcgccctcgccgagctcggcgtgcatcgcgtagtaatcgcagttcttcgcggtcagatcgtagcgcgcgcagagctccatcgccttgtcgacggccgcggcagcgtccttgccgaacgggtacggccctgcctgcggcaccgcgacggagggcaccgcgatgatctccttcaaatcgcgcagtatatcgtcccagtaatcgagaatcttctcaccaaacatacataacttcctttccaattggatatatatctatcataatccatccgggcggcaaaatcaatgcaaagtgcgaaaaatatagtccgcacaacggcgtatttatgccggaaatcccggagaaaaggcaggcggggcatcggtatgctgaattccatctgggcggttctcatcctactggccgttctcggcgcggcggtgacggggaatctcactgtgctttcgaaggccgcggcggacggcgcgcagagcgccgtggagactgcgctgctgctcacgggagcgatgtgcctttggctcgggctgatgaatatcgcgtcgcacgcggggctcacggaaaagctctcgcactgtctttccccgctgatctgccgcctgttcccggagtatgccgcgcacagggcggtcggcgagaagatctcgatgaacatcgcggcgaacatgctcggcatggggaacgcggcgacgccgctcggcctcgccgcgatggatgagatgcagcgcctttcgggcggcgatacgccgacgcgcggcatggtgctgttcgtcgtgatgaacacggcggcgttccagctgatcccgtcctcggtcgttacgctgcgcgcgtcgttcggcagtgcaaacccgtacgacatcatggtgcacatctggttcgtatcgatcggcagcctcttgacctgcatcttcgtctgcaagctgttcgagcggctgcaaaagaaataatattgaaaaaagccggcgcaggccggtttttgtgcggaaagggggagcggctgtggcgcaaatcggcgcggcggcggtctgcgcggtgatcgcggggatcgtcgccgtcgggtacataaagggactgccggtgttcgacctcttcatcgagggcgcggcgcaggggctgaaaaccgccgtgaagctgctgccgacgctcgtggggctgatcgcggcgatctcgatgctgcgcgcttcgggcgtgctggagctgctggccggcgcgctgcgtccgctgacggaatggatcggcctcgatccggagatcgtcccgctcgccctgctgcgcccgttttccggcagcggctccgtttcctatgtcacggcgctttacggccgcttcggtgcggacagcgagacggcgcggctcgcggcgatcctcgcctcctcgacggagacgacgttttatgcggcggcggtctacttcggcggccgcggcctgcgctcgacgcggtacacgattccggcggcgctctgcggcgactgcatggcggtggtgctctcgatcatttccatccggctgttcggctgagatttttttctgtacgcgtgcgggaaaatgtggtatactgatttcatcaaaacagtgcggaggaaacggtatgctgctcacattggacgtcggaaacacgaatatcacgctcggggtgtacgcgggcgacacactgcggtttgtctcgcgcatggcgacgaacccgccgcgcatggaggaccagtatgcggcggacctgcttgcgattttgaagctctacggcgtggagccggaggaaatcacgggcgtgattatgagctccgtcgtgccggggctgacggccccgctcacgcgggcggtgcggcgcgtgcgcaatgtggagccgttcatcgtcagcgcggagacggtgccggacctcaaggtgcgccgggacatgcccaacacgctcggcgcggacctgatcgtcggcgcggttgcggcaaaggcgctgtacagcggcccgtgcatcgtgatcgatatgggcacggccacaacgctgaccggcctgaacgccgagggcgaagtctgcggcgtcgtcatcattccgggcgtcggcacatcgctcgacgctttgacgagccgcgcggcgcagctctccgccgtgggcttacaggcgccgccgcaggtgctcgggcgcaacacgatggagtgcatccagtccggcatggtgttcggtacggcctgcatgctcgacggcctttgcgaccgcatcgaggaggagctcggcgaaaaatgcgcggtgatcgccaccggcgggctggccggcatggtcgttgcgcagtgccggcgcgagatccgcctcagcgacacgctgctgctcgacggcctcaagctgatctgggaccgctgcggcgcgtgacgccctgaaaaaattgcctgagcggcgcgctttttgcggagaaagcgcgccgtttctttcatctttatgaattcctgcaatcccggcttgccagaggggccgcgcatgtgctatactacatagcgtgccaaaatgcttcaaaggagattcataatgaaggaaaaaaagaagatcccgtggggacttttatacgtggcgctgaccgtcgtcatcctgcttgtgttcggccttgtcaaccgggaattccgaagcatgcccgccgtgctggcagggctttcgctcgggttcatcgtgctcgcggtgctgatgaccggcgtgttcctcgtcatagagggcgagatcatccgcctgctgctgtggtgccaaggggagcgcgtcggcttttggacgacgctgaaaatcggcctgatcggcatctactattcctatatcacgccgagctccacgggcggccagccgatgcaggtcgtctacctgctgcgcgataaggttccggccggcaattccacggcagtgctgttcgtcaaattcttcgcctatcagctctcgttcgtgctctgcacggtggcctcgctgatctacatgtacccgcagctcaaggcggaaagcccgcagctcatcccgatcatcctcgtcggcatcgcggtcaacgggctttggatcgtcgcgatcccgctgctgttctgcgcgccggtgctgcacggggtgatgcggggcattgtctggctgctcgagcggtgccgctttctcaaaaagcgcgcgcagtacatcgaaaaggtgcgcggcttcgagaatgatttcgcctcctacacggagaaattcaggcacaagaagcgctactatgtgtatgcggtcctgctctcgattccgcaggtcattttgcagatgagcgtgctctatgtcgtgttccgcgcgttctcctacgatctgccgtatctcgagctgctctgcatgcagacgatgctgcaggcctcggtctgctttgtgccgctgcccggcgcctccggcgcgcaggagctcggcttctcgatgttcttcagctcgtattttgcctccggcgacgtgctgtacaccgcggtgctcgtctggcgcttcttcacgtattacatcgtcgtcattctcggcgcgctgctcgtcgtggcggatcagatcgtctacggccgccgccgtcgcctgaaggcggaaaactgaatcagccgcccctacgggctgcttgtctgccgcacacaccgtgcgccggaccggcggcgtgtaagggcgttttttgtgcagaaatattgacaaagacccttggcgcgcgtatatttgtagtgcggttcgccgcataaacggcagatggccgcgaatttatctgtagagaaaaaggagaaaacagaatgctgaacattcaaaacctgacgaagcggtacggcagcaagacggctgtcgacaacctcagcctccacatcgaggcgggggagatctgcgcctttatcggccacaacggcgcgggaaagacgacgacgctcaaggcctgctgcggcctgctcacgccggacggcggcgcgatcaccgtagacggcatgccgatccgcgaaaggccgatcgactgcaagcgcgtgatggcatacatacccgacaacccggacatgtatgagttcctgacgggttatgagtacctcaattttgtcgccgacgtttacggcgtttcaaaggccgaccgcgagcggcgcatcgcggagctcggcgagctgctcggcatcaccgaggcgctcggcggcgcgatctccgagtgctcgcacggcatgaagcagaagatcgcgatcatctcggcgctgattcataagcccaagctgattttgatggatgagccgttcgtcgggctcgacccggtcgcggcgcaccagctcaaaaacctgatggcggagcactgcgcggcgggcggcgcgatcttcttctccacacacgtgctggaggtcgccgaaaagctgtgcaacaaggtcgcgatcatccggggcggcaagctggtcgcctacggcgcgatggacgaggtgcgcggcgattcctcgctggaggaaatcttccttgagctggaggaggaaaaggcgcaatgaaaaacctgatgaaaattcagctcaaaagcatgctcttccgcatgcggcagagcggcggcaagcggatgtccggcgcgctgattctcggccttttgatcttttccctcgcctgcatcgagctgcttttggtccttgtctggtctcagatgacgatgttctgctcgatggggctgacgtggctttacttttcgatggcgggcatcatggcgctcgcgctcgccgtgttcggcagcgtgtttatgacgcagacgcagctctatgacgccaaggacaacgagctgctgctttcgatgcccattcgcccgctccatatcctgatgagccgcatggcggtgctgctcgtgctgacgggcgtgttttcccttgccgcgctgctgccggcctacgctgtgtacgccgtggccttcggcgtgacggcgcagctcgttatcggctgggtgctttcggccgcggcgctgattctgctcgcgcaggccgtgtgctgcgcgctcggctgggtgctgcactggcttttgagccgcctgcggaacaaggcggccgtttcgctggcctttacagtgctgtttctggtcctctacttctatttctacgcgaacgcgaacaatctgctgacacagctcatgctgagcggcgagcagatcgcggcggccgtgcagggcgcggcgtggccgctctatgcggtcggcatggggatgagcggctcgcttctctacacgctgttcacggccgcgctcggcgcgggtgcatttgcgctcgtgagccgggtgcttgccgcctcctttgcgcgcacggtcgccgctgggaacggcggcggtgcggcgcgcagaaagcgcggcaaaaacgacacgcgcgtccggcagccggtgcaggctgtttgccgcaaggagctgcgcaagttcctgacgagcgccgtttacctgacgaattttggtctcggcctcgtgctggtcgccgcgctgccgattgcggcgctggtctttcgcggtcaaattctggagatgatcggcctgctcgacggcttccgcccgtttatcgccggcgttgtggtgcttgtgtcggcgttctgcatttcgacctcgtgcatctctgcgccctccgtatcgcttgagggcaagagcctctgggtgatacgctcgctgcccgtcagcggccggacggttctgcgcggcaagctgcggatgcactgcatgctgctcgtgccgctctccgctgtctgcgtgctggcgctcgcgctgctcgtgggctgcggcatcgccgacgctttgctcgccgcggcgatctgcggcgtgttcggctggttcgtcggtgtggcggggctcgtgtgcaacctgctttcgccgcgctttgactggatcaacgaggcgggcccctgcaagcagtccgcggccgtgtttctgacgatcttcggctcgtacatcgtgatggtcgcgttcggcggcctcttcatgctgctgtattccgcagggctgccctcgacggcctgcctcgcgctgtgcgcggcggtgctgctgcttttgaccgccggctttcacacgcttctgatgcgctggggcggcaggcgctttgaaacgctttaaatattactgctgatccggctgtgccgcgtatggggagatcctccgtgcgcggcattttgcgttgaaaaatcctgtatttcaaagatttctccccttgtgcggcgcggtatgtttcgtttacaatataaataaatacaaattgcggtcaaggagagatgaatttatgagcaaaattcacggcgtcaatctcgggaactggctcgtgctggagaagtggatgcacccggcgctctttgagggtgttgcggcggaggatgaaaccgacctgtgccggctgctgccgcgggacgagcttttggcacggctgaaaaagcaccgcgacacatacgtcacgctcgaggattttaagtggatcaaggcgcacgggctcgacacggtgcgcatcccggtgccgcacttcattttcggcgacgcccccgcgttctgcgacccgtacgtgccgtgcatcgagtacctcgacaaggcgttcgattgggcggaggagaccgggctgaaaattctgatcgacctgcataccgcgccggacagccagaacggtttcgataacggcggcatctgcggcgtgtgcaagttctggcagaagccggaaaacgaggcgcgcgtcatcaaggtgctcggcatgctttccgcgcggtatgcggaccgcccggcgcttttcggcgtgcagattttgaacgagccgatttcccccgagctgtggaagcacatcgaggggcgctacccgcccgccgaccccgaatatgcggcgggcagcggcccggtgccgttcgagtttctctgctcgttctacaaaaaggcgtacaaggagatccgccggtatctcggcgaggacaaggttgtcatgttccatgacggcttccgcctcaagatgtggaaggagttcatgcagacggaggaattcaaaaacgtttggctcgacacgcacatctatatgatgctgcccggcgaatttgagacgaaggacatggcggggctcgtgctcagccgcttccgcgacgacatccgcgagatggcgcagcacttcccggttgtcgtcggcgaatggtgtctctcgcacaatccgaaggggatggatgcgatgacggactgggagaaaaagctctcctaccgcatgttggcggatgcgcagctcatggcgtgggacgagagcgccgggttcttcttctggagctacaaactgatgtccgatcccgccggctgggatttccgcaaatgcgtggaaaacggctggctgccggagatgatcggccaataagcggaatatttttgtggggcgtctctgcggagacgcccttttccgcgttttcagaccatgcggcgcagacgcattgtattgacaaaatgcacaaaacacattatactatgttcatgttttatcggaatatgtacgggccggcaatgccggtctttggggagaaatgccgcctgcacagtgcggcacgagccgggtaagggagtgaacgcgcgtatgattaagctgctgatcgtggacgacgagcggacgatccgcaacggccttgcgaggcatatggactgggaaaagctcggcatcggcatggtggagagcgcgggaagcgccgaggaggcgtttgcacagtgcgagaagatccgcccggatattctgctctccgatatccggatgcgcgggatgggcggcgtggagatgtgcacgcagatccatgcgcagtacccggagtgccagatcatttttgtcagcggctacgcggacaaggaatacctgaaggcggcgatttcgctcggcgctgtggattatatcgaaaagcccgtccgccccgaacttttggccgcggccgtcaaaaaggcgctcgcggcgtgcgaggaacagcagcgcaaggcggaagcggacgagacggttgcagagagccgcggcatggtggggaaaatcgtgctgcgcgcgctggcgcacagcgattatcccgagaatttcgagaaatgccttaaaatttcaggcctgtttccgcgcgcctatgagacataccgcttctgcctgctgcgcgcggaaagccccgtggcaaataccggcgcggcggaaaaggagctgcgggcgtacttggcgcagctcgccccggccggaggcggcgtgcagtacggcgcgtttatcgacgaccgcgattttttgatcctgctttgcggcagtgcggcggataccggagacggctgcgcacttttggaggggctgcgccgcggcatttccgcgctcagcgtggatgggtgccggttctttctggcgtgcggtcccgccgtgcacgaccggatggcgctgcaccgttcgtacgacgcggcgcgcggcggcctgcgcgagctctttttcaagggctggggacagtatgccgcgcagaccgagacgcggccggtggcgccggtcagcttcgataaggcgctgatccacgcgtttgcggcggcgctcagccggcaggacggggcggagatcgaccgcgtgctcgaggagatccggcagcggctttccgcgcagacggacgcgaaccccgagcagatccgaaacgtctattactcgctcgtgtacctgatgaacaccgagaacgaccgcaggatactgccggagggcggggagagcggcgcggcgctcggcggcatcagccggatgcaggcgctcgagacgatcgacgcgctgggcggcttcgtgcgcgactgcgcccatgagctgaccggactgtggcaggcggacgacgagaactgtcccgccgtatggcaggtgatccgcatcatgcgctcgaattacggcgataaaaacctttctgtcaaatcgcttgcggagagcgtctatctgacgccgacgtatctttccggtctcttcaaaaagcgcacgggcaagacgatcggtcagtatctcacggaaatccgcatcgagtactcgatgaagctgcttatggataagcagcttaaactctaccatatagccgaactggtcgggtacgaggacccgaactattttgcgaagatcttcaagcgccatgtaggcatgacaccctccgaatacagggaaaggcagctgtcgtgaataggtttctgctccgccggctgccccggggcggcacgatgcgcacgcggctcatcctttcgttttccgtgccggttctggcggttatgctgctggttctcgccggcgtgcacagcatcctgctttccggcagcgagtcgcaggtgctttccactgcgcgctcgagctacgaccaggcctacgagcttgcgacaagctatatcgagctgatgctgtacgcctcggacagcatctattataacggcgacctgcagcggattttgagcagccgcgattaccttgaggagatgcccgcggcagaccgctaccgcgagtttctcgtgctggacgacgtgttttcgatggcggagaatgtggagctgatctaccgcacaggcatttacctgaattcggaaattccgtacacaaacaacctcacgcatatcatgccgctggaaacgcttttcgagcgcgcggattatgcgcggtatgtgttcacgatgcagcgcgaccgcttctatttttcggcgcccgtaaacctctatacggccggcagcgacacgccggtgcgcgcggtgacgctgctgcgcccggtgcgtgcgacggacggctccgaccggcagctctgcgtcgagcaggtgagcgtcgaggtggaatcgttttcgagcgtgctcgcctatgcgcaggcgacggagggctcgaccgtctatctcgtgaacgaatacggggagctgatcgctgcgacggacagtgctgcgtaccggaaaatggagcgcgacggcgcgctgccggcagacggggacgacgccgaatggacccggacggcgctcggcggccgggcgtattacgtgctgcgccgccatatcccgaacgcgcgctggacgctcacggcgatgatcccggtggaggacgtcagcgcgcagagccggtatgtgacgatcgtgctcatcgcgcttgcggtcctgattctggccgcgatcgtttttgtagcgatcatgctggcgaactcctatacgcgccgcctgaaaaacctgaatgcgctgatccaacgcgtccgctccggcgagctgaaggcggagcgcggcagcgaccgggacgaggatgaaatctccgagctgtttaacagcttcagcgacatgacggcggagctgaaaaacctgatgcgcgcgcagtaccgctcgggcaaggcggtgaagtcggccgagctgcgcgccttgcaggcgcagatcaacccgcatttcctctacaacacgctggacctgatcaactgggaggccttcgagcacgacgcgccggagatctctgaaatcgcgcagaacctcgcgaaattctaccgtatcagcctcaacaaggggcggcagattttgacggtgcgcgaggagctcgagcacgtgcgcgcctacgtgagcattgaaaaccgccactttgacgacgcgatctgcctgcacatcgacgtgccggaggatttgcaggcgctggcgtgcatcaacatcatcctgcagccgtttgtcgagaatgcgatcgtgcacggctttgcggaaaacccggcgcgcggcgtctgcaatatccgcatcgaggcgtggcgcgaagcgggggacgttgttttcatggtttcggatgacggccccggtatgacggaggcgcagacaaaggccattttccgcagaaacacggcgcggcaggtttcgggctacggtgtgaaaaacatccattcacgcatccagctctccttcggggaggcctacggcgtgacctacagaaacacaaaggaatcgggcacggccgtttatatccggcttccggcgctgacgccggaggaggcggaaaggcggatcgaaaacctgtgagaaaagcacatgcacgcgaagcaaagcggcatgtgctttttgcataaaaaataattcgtgtaaaacatataaatgtaggtttaactgtatgtagcgctgctgatttgcattgaaggtggcaaagagcataaaaacatattataagttagcttcttttgttcaaaagcatacatttttccttaaaatcgtaaaaatgtcctctttcattcaccgtttattcataatacaataaaggtgtgatatttcacgagaattttggacgaatttcataagggggaacgtaaatgaagaagcacgggttcttatatgaacttaaaaagaacaaggttttgtttttgatggcgatgccgtcggtgctcctgaccttctttctggcctacctgccgatgtccggccttgtgctggcctttaaaaattaccgctacgaccgcggcattttcggcagcgactggaacgggttcgataatttcgcctacctgtttcaatccggcacgggctggcttattacgaagaacacgatcctgtacaacctgctgaatctgttcgtctcacagcttctggccgtcatcgtggccatcgtcatctcggagatgatggggcgcatctacaagcgcatcgtgcagtcggtcatcttcctgccgtactttatttcctgggttatcgtcggcacgttcgtgctcaacctcttcaattacgagacgggcgtcatgaacaacctgatccgctccttcggcggcgagccgatcaacctgtacacctcggagatggcgtgggtctgggtcatcatcatctgtgcgttcaactcttggaaatgggtcggctacaactcgatcatctacatagcggctatcacgagcctcgacgcggaatgttacgaggcggccgacatcgacggcgccaacgtgttccagaagatctggtacatcacattcccgtcgatcaagcccacgatcgtcacgatgctgctcctgcaggtcggccgcattctccgcggcgattttgaaatgttctaccagatcatcggttcaaacggacagctctacaacgcgacggacgtcatcgacacctatgtgttccgcgcgctgctgaccaacccgaatatgggcatgaccgccgccgcatccttctaccagtcggcgctgtgcttcatcatcattatggttgtgaacaacatcgtaaagcggatcgaagccgattacgcattgttctgatcgggaagggggaaataatatgtcagctacaacttcggtgaaatcgaacaagatcaaggttgcaggctccacatgggccttcaacatcatcggctacatctttatcacgtttatcgcactcgtctgtctgctgccgtttatcattctgatttccggttccttctcctcagagcaggcggtccgtctcaacggcctgagcatttttccgcaggaattcacgacggaggcgtatgaatttgttttccgcaacccgcaggagatcatcaattcctacggcatcacgattatgatcacggcggtcggcacgggtgtcggcctgatcttcctcacgatgacggcgtttgtcatcagccgcaaagatttcaagtacagaaacgtcatttcgttctacttttactttacgacgctgttcaacggcggcatggtctgcacgtacatcttctacatccagtattatgggctgaaagataacctgctcgcgctgatcctgccgggcctcaccccggtgttctacctgctgatcatgcgcaacttcgtctccggcataccggcggcgctgatcgaatcggccaaaatcgacggtgcgggcgagctgcgcatcttcttccagatcgttctcccgctgctcggctccggcctcgcgacgatcggcctctttatggcactgacgtactggaacgactggtacaacgcgatgctgtacatcaacaccgaatggaagtacccgctgcagtacatgctgtacaacatgatccagaaggcggctgcgatggcgcgcgttgcaagccagctcggcatcccggtggaaaacctgccgacgaacacgctgaagctcgcgatggccgtgatcgcgacgggcccgattatccttttgtacccgttcgttcagaaatactttgtcaagggcgttacaatcggttcggttaagggttaaccgaaaaacagaccgatttgtaaaaatatttttggaggtagtattatgaagaacaccaaaaagctctttgctttggttctcgcgctggcgctcgtatttacggcgttcgccggctgtgcaggcggcaccggctcttccaccggcggctcggcgtccggagacgccggcacgggcgacggcgaggggcttccggccctcgatacttcgaaggaagtggagctggtcatgtactttatcagcgaccgtcccgcgaagtacgatgagatcgaagcgaacttcaacgagatctttaaggaaaagctgaactgcacgctgaaaacggagtggatcgcgtggtccgactacgcgaacaagtatccgctgctgttctcctcgggcgaaaagttcgaccttgcctacacggcgacgtggctcggcttctcgaactatgcggcaaagggcggctttatgaacctcgacgagctttggccgacctacgcgccgaacaactatgcgctgcagtctgaagccggcctgacgcaggcgaccatcgacggccactactacgtcatcccgactttgctcgcgacgtactccgcatacggcccgtattaccgcacggtattcgaaaacggcacggtcacgtatgacggcgaggtcacgaactgggaggactatgaagagtacatggagtgggtgcaggagaacacctcgatcacccagccatacggcctgtactcctccggtctcgaggcggacgacatgtattacggctccatgggcctttacaacatccgcggtacctcttggctgagtgttgacccgtatgccgatacgtttacgctggttccgaactacgagaacgaatttacgatggattacctcacgatgacgaagcgctggagcgacaagggcttctggtctaagtccgcgctttccgatacggacagcacgaaggtgcagaacggcatcgcagcgaccggtatccacaatgtcgatacgtattccagccgttacatcgaccagccggaatggggcttcaagtacacgaactttgtaaaggacgtctcgaacctgccgttcacgcaggatgcgtgcgtcatcccgtccacgtcccagaaccccgaaagagcgcttgcgctgtgggatctgatcacgaccgacgaggaagcctaccgcgcgtttgtctacggcatcgagggtacctcctatgagatcatcgacgatcaggttaagatgatcaacacggacgactatgccggcaccggcatgtggtccgcgagaacctctgaattcaacctcgattcctacggcgcgccggcggatatcccggagatgaaggccgagtgggatgcgtacatcgaggagaccggcaaccaccagagccagtacctctccgcgtgggttccggatacgacttcgatcgagaccgagtacgcggcctgcacgaatgttatccagcagtactggtggccgcttgagtgcggtttcgtggaggatctcgaagccggcctcgaggagtatgcgacccagatgaaggccgcaggtgcggagaaggttatcgagaccctgcaggcgcagctcgacgcgttctgtgaggagcatccgcagggctgatttcaggcagcaaacgcttgcgccgctttcggcgcgggtgtataatgaaaccggatggcggcggtggggagtcaatctccaccgcccttttcgggccggaaaagcctgtacgtacaaatggccgcacggcgtgctgccaaccgacagaaaggaacctgttttatgaatgagcttttatacggcgtcgcgtactacgacgagtacatgccctatgagcggctgcaaaaggacatggaaatgatgcgggcggcgaacatcaatgtgatccgcattgcggaatccacgtgggccagcgaggagccggagaacggcgtctttaatttcacgcatgtcgagcgggcgctcagggccgcgcaggcggcgggcatttccgtcattgtcggcacgccgacgtatgcggtgccgccttggctcgcggctgagcaccccgaaatcatcgcggtcacgccgcgcgggcagggcaaatacggcgcccgccagaatatggacatcacctcgcccgcctaccgcttccacgcggagcgcgtgatccgcaggctgatggaatgcgtgcagaaatacccgaacgtcattgggttccagctcgacaacgagacgaagcactacaacacctgcggcccgaacgtgcagaagcggttcgtcgcctatctgcgggagaagttcggcacagtggaggcgctgaatgcggcattcggcttcaattactggagcaaccgcatcgactgctgggagaacgtgcccgacgtgaccggcacgatcaactggagcttcgcggcggagttctcgaaattccagcgcacgctggtcgatgaatacctcgcgtggcaggccgcgatcgtccgcgaatacgcgcgggcggatcagttcatcacgcagaatttcgactacgaatggcgcggctactcctacggcgtgcagccggacgtcaaccacaagactgccgcccgctgcctgatggttgccgggtgcgacatctaccacccgacgcaggacaagctgaccggcaaggagatcgcggtctgcggcgcgctttgccgcagcctcaaaaacgacaactacctcgtgcttgaatcacaggcgcagggccatgtgaactggacgccgtacgaagggcagatgcgcctgcacgcgttcagccatgtggcaagcggcgcaaattccgtgatgtactggcactggcattcgatccacaattcgtttgaaacgtactggaagggccttttgagccacgacttgcagccgaacgccccctaccgcgaagcgtgcacgatcggtgccgatttcaagcgtctcagcgggaagctcgtgaacctcaagaagaaaaaccgcgtcgcaatgtttgtcagcaacgaggcgctcacatcgctcaatctgttccgcctgccggacggcaaaaccttctataacgacgtggtgcgctggctgttcgacgcgctgtacgagatgaatgtcgagtgcgacatgctgttccccgaggacgagaatttcggggactatgacgtgctgctcgtgccggcgctttacaccgcgccgcgcgcgctgctcgagcggatcaaggcgttcgccgccgcgggcggcgagctcgtcgcgacatttaagacggcgttctcggatgaaaacctcaaggtgtacccggagacgcagccggccgtgctttccgaatgcttcggcatcgcgtacgacgagttcacggtgcccgaaaatgtcggcgtgaccggcgaagcgctgcccgcaggcccggcctcggtatggatggagctcgtccgccccgagggcgcgtcggtgctcgcgcactacaaccacaagttctggggcgaatacgcggcggttacggagaatgcgttcgggagcggacacgcgacgtatctcgcgacgatgacgacgcccgaatgcctcaaggccgtgctggagcgcgtcctgaaacgcgccggcgtctggggcgtcgagcagcaggcgcagttcccgctcatcatcaagagcggcgtcaatcaggcggggaagaacgtgcggttctacttcaattattccggagaggacgccgcgcaggcgtacctgcatgcggacggcacagagcttctcggcggcgaggccgtgcgaaacggcgatacgctgcagtttgagccgtggggcttcaagatcatcgaggaggcctaagacggcccgcgggcgtgctcggcgcacagcctgcgaaaatgtaggaaatacagccggtgcgttccagcaccggggggctcggcgttttgccgggccccttttgcgtgcgggggcggcggatgcacgcgtagcacggcggaagcggatatgcgtgcccgcggcttgcctttcgctgtgcggaaaaggccgggaccggcatgccgggccgcagcggggccgatatgcgcggaacgcgggcgtacaaaacgcgtcgttcggaatacatggaggcatgccgctaaaaacccgaaaacccacggaattgcaggatttttattgatttccgtcgaaagaagtgctattcttattctacgattgaatttaggggagggtgtgccttgatttatacggttacgctgaatccggcggtggattatgtggtatcgctcgatgcgctggagacgggggcaatcaaccgggcggcctcggaaaacgtcgtgttcggcggcaagggcatcaacgtgtcgctgatgctgcgcgcactcgagacgccgagcgcggcgctcggatttattgcgggctttacgggtgaggcgatccgcgccggcgtggaggcgcagggcgtccgcacggatttcgtcgcactggagagcggtttctcgcgcatcaacgtgaagctgtatgccggcgaggagacggagatcaacggcgcagggccagagattccgccggaaaagctcgagctcttttttcagaaattgcaggcgatgacagacgcggacacgctcgtgctttcgggcagcgtgccgccctcgctgcccggcgatatttacgcgcgcatcgcgggcattgccggggaaaaaggggcgcggctgatcgtcgacgcggcgggaaagctgctgctttccgcgctgccgtaccgcccgttcctcgtcaagccgaaccgggaagagcttgcggcgctgtttgacgcgcctgccggcacggacgaggccgtgctcgcgcttgccaagcgcttgcaggcgcagggagcacgccatgtgctcgtctccatggccggagacggcgcgctgctctgcacggaatcgggcgaggtgtaccgcgtgcccgcggcgaaaggtacagttgtaaactcggtcggcgccggcgattcgatggtcggcggctttcttgcggcgctcgagaaaacgggcgattttcaggcggcgcttgcgctcggcgcggcggccggcggcgcgacggccttctcggtcggcatcgcgggctttcagaaagtgatggcgctttacgaacgcatcaaaacagaggtgaagcgcattggatagttttctcatcgcgctgaacgccgtcatgccgacgtttctgctgctcgcattcggctattttctgcgcaatgcccattttgtggacggcgcctatctgaagcagacgaacgcgctgaccttcaaatttttcctgccggttctgctgttcaacaacatctataagacgcggatcgccgagattttcgacggcacgatgttccttttcgccgtcgtcagcctgctcgtgctgtttggtgtgctgtgccttgtggtgccgcgcgcggtgcgcgagccgcggcagcgcggcgtggtcattcaggggctgttccgcagcaattacgtgattttcggcgtgagcctcgtcacgaacgtgttcggcgcggagcatgcggccgcggcctccatgctgagcgccgtgcttgtgccgatgtacaatgtccttgccgtggtggcgctcgcctttttcacaagcggcgaacgcgtgccgctgaaaagcacgctgaaatccatcgcgctgaacccgctgattcttgctggcctgctcggcgtgctggcttcgctcgccgggctgcggtttccgacctttttggagacggcggtcaacgacctcgcaaagctcgcgacgccgctcgcgctcatcgtgctcggcggcgatttcagctttaaaagcgcgcggggcaatatccgcctcgcgatgacggccgttgcggtgaagctcgtcgtgatcccgctcatcttcatcccgcttgcggtgctcgcgggcatccgcggcgcgaacctgctggcgctctcgctggcgtgggaaacgccggttgccgtttcgagctatatcatggcgcagcaggccggcgcggacgaccagctcgcggggcagctcgtggtcatcagctccgtgtgctgtatcccgaccgtatttctaatgatctttattttgcagagccttgcgctgctgtgaggaggtaaagcgatgcagatcaatgcagaacgtcttgtccatacattttcggagctcgtcgcggtggatagcccctccttcggcgagcgtgcgatggcggactgtctccgggacaggctcgcggcgctcggcatatcctgtaaggaggacaatgcgggcgcggcgctcggcggcacggccggcaacctctttgcccgtgtgcccggcacgctcgagcagccggcgctgctgttctgcacgcacatggataccgtcgcgccggcctgcggcaagcgggccgtgctgcacgaggacgggcggatcacgagcgcaggggacaccgtgctcggcgccgacgatctcgcgggcatggcggtgctcttggaggtgctcgaatcgctgcgcgagcaaaacatcgcgcaccggccgctggagcttctgttcacggcggccgaggagccgtactgcgccggtgtgcggcacttcgatttttcgcagtgcgcggcaaaaaccggctttgtgctcgatctgaccggcccgatcggcacggccgccgtcgccgcgccgacgatcctttccttcacggtggaggtcacggggcgcgcggcgcacgcgggctttgcgccggaggcaggcgtgcacgcgatcgatgctgcggcaagggggctcgtgcgattgcggcagggcaggctggaaggcggcacgacgctgaacgtggggctgatctccggcggcgcggcggcgaatatcgtgccggagcgctgtgtgctttcgggggagatccgcagcatgcggcatgatcgcgcgctggcgctttacgacgcgctttgcgaggtattccgggaggaggcgcaggccgtgggcgcctgtgcgcgggtagactgcgacgtcccgcttcgcgcttaccgcgcggcggagaatggggacgccgtccggcgctttcagcgcgcctgcgcggcagagcggcttcccgtgcgccttatcgagacgttcggcggcagcgacaacgcggcgctgcaggcgcacggcatcgacagcatagtcgccgcaaacgcgatgttcagctgccactcgacggacgagtacacaaccgttgaggatctgaaaaagacggcgctgctggtcgcccgcttaatcacggatgaaatctgagttatggaggtagaaaggattgaaaataccgctcgcttatcaaaaaacggaatacgactgcggcccaaccacgatgatgaatgcactgagctgcctgtttgaccgggaaattatcccccctgacgtcgtgaagtacatcatgatgtactcgctggacgcgtacaacgagcgcggggaatacggcaaaaacggcacgtcgcagatggcgatgatgttcatgacgagctggctgaaccattttggccgtgtcaagcgcttcccggtgcactgcgagtacatctcgggcagcgaggttttcatcgggcacaacagcaaaattgtggacggtatcaggcgcggcggcgtcgtagtcgcgcgcgtgatgtacgacgtttggcactatgtgctgatcacgggctgtgacagcgaatatgtttacctgttcgacccttactaccgctgccggccgtataagatggagggtgtggacctgattgtggataagccgctcacgcgcaaccgccgcgtgcggcacgagatcctgaacgatacgaaaaagacgatgtatgcgttcggcgacccgagaatccgggaagcggtgatcgttttcaacctcgataaatcgaagccggccgggaacacagcttttccggagtaagacagacgcacagcgaaagccgtgcgtcttttttggcgccgttttggcggccgcggcacgcaccgcggggaaagcgggcgctttgtccggtgcgcaggacggattttatccaaaaaattccgctgtgcgcctatcaatctggtcggtaattgcggaaggcgggcaaataggcggccgcacacaaaaagctcgaaaaatgtccgtttggagcggcggcatgccgcgcagaatggtataatacaaagaaacatacagaagcggggtgatcgcgatgaagaaccatcgattctgggcttgggcagctgtattttgtatggccatggtcttttggaccggctataagcacaaataagggggttataccatgaaattctataaggaaatcgcattgtttgccggcggcgtgctgttcggcacggcgggcatcaagatgctttcgagcaaggacgcgaagaaggcgtatacgcacacgacggcggcggtgcttcgcatgaaagaatccatgatgaagacagtcacgaccgttcaggagaactgctccgacattctggcttccgcaaaggacatcaacgagcagcgcgcagagcaggaaggcgaaatgcttgatgcctccgagacggatgcggagaattccgctgaggcttgacgcacagcttcggacaaaaaggcgcagggccgcatggtatgcggcctttttcctttggaggtaaacctatgaaatgtaaaattgtatatgaaagccgcgggcggctgcgggtgcagcttctgcaaaaaagaatgacgctgcggcaggctgacctgctggagggctggcttcaggcgcaggcgggcgtgcagcaggccacggtgcacgagcggacctgctgcgccatcgtgcgctatacgggcgaacgcgcgcgtatcctcgcgcattttcgggtgttctgctgggaacgggccgaggcggagatcgagattccgcagcagagcagccgggagatcaaccgcgcctatgaggaaaggctcgtcagcatggcggtgttccggcttgtgcggtcggtgttcttcccggcgccgctgcgcatggccttcacggtggcccgcagcgttccgtatctgctcaagggcctgcgctgcctgtggcggcggaagctgcatgtggagctgctcgacgcgctctcgatcgggatctccatgctccggggcgatttcggcacggcgggctccgtgatgttcctgctggggctcggcgagctcttggaggaatggacgcacaaaaaatcggtggacgacctcgcgcagtgcatgtcgctcaacatcgaccgcgtctggctcaaaacgcccgagggcgaggtgctggtgccggtaagccgggtgcacagcggcgactgcgttgccgtgcatatggggaatgtcgtcccgcttgacggcacgatcgaatgcggcgagatcatggtgaatcaggcgtcgctgaccggcgaatccgtgccggttccgaagcgcccgggcatggcgatctatgccggcacggtcgtggaggagggcgagtgcacgctccgcgtcacacagcaggagagcggcagccgctacgataagattgtttcgatgatcgagcagacggagaagctgaaatccgaggccgaaaacagagcctccaatctggcggataagctcgtcccttacacacttttcggcagcggcctgatatggctgctcacgcgcaacacgacgcgggcgctctccgtgctgatggtcgatttctcgtgcgcgcttaagctcgcgatgccgctcgcggttctctccgcgatgaaggaggccggcgcgcagcacatgacggtgaagggcggcaaatatctggaggccatcgccgatgccgatacgatcgtgttcgacaagacgggcacgctgacgcacgcctgcccgaaggtcgtggacgtcgtgacctttggcggccggagcgaggtggaaatgctgcggctggcggcgtgcctcgaggagcatttcccgcactccatggcgaacgccgtcgtgcaggcggcgcgcgaccgcggcctgctgcacgaggagatgcactccgaggtggagtaccttgtcgcgcacggcattgcaagcgccgtgaacggtgagcgcgtgctgatgggcagcgcgcactttgtgtttgaggatgagggctgcaccgtgcccgtggcggagcaggagcggtttgaggcgctgccggcgcagtattcccacctgtatctgacgatcggcggcgtgctggccgcagtgatctgcgtttccgacccgctgcgcagcgaagcgcgggcggtcgttgaggcgctccggcagatgggcgtgcggaaaaccgtgatgctgaccggcgacagcgagcgcacggccgcggcgattgcggcgcaggtcggcgtggacgagtaccgctccgaggtgctgcctgaggacaaggccgaatacatcgagcgggagcgtgccgcaggtcatacggtcatcatgctgggcgacggcatcaatgattcccccgcgctttcggcggcaaacgtcggtatagccgtcagcaacggcgcggcgattgcccgggaaatcgccgacgtcacgatttcagcgaacgacttgtatgagattgctgtgctgcgcgcgctcgcccagcggcttatgcgtcggatccgctcgaactaccgcatggtgatcggctttaacggcgcgttgatcgggctcggcatgctcggcattgtgcagcccgctgtctcagcgacgctgcacaatctttctacgctcgggatcagcctgcggagcatgacgcggctgatgaacggcgcagattcggagcagcacggcaaagcgcagtaagggcgcggatcagagtattcggtaaaatttataaaaaacgaaagcagggtgaataccggcgccgccggagccaccctgctttttgcttgcagagaaagcgggggctgccggcgatcaaaggctgagacgaaactgtcgctttgaagaatacaggtgcaggcatagccaagctgccgatacgggccgccggggcggaggggaaatcctccggcttcggcggctttttgtttttttacgggggagctgcgtgccgaaaaggaggttttacggcggcggatgcggcccgagtttgcaggaagtggagcaaaaatgaaatgaaaattggcaaaaaatgttaaataatcataaatccagccatttcgtttgcagcgcggattttttataataaagggcaaagaaaggccggataccctgcacggactgatccggaccgcgcggcctcgggcattccgggtgccgggccgcgcgggggcgatgcggagaaaggatgatgagagattatgacagcaaaggcagtggaaaaggaacggagagcatggcaaacaagggccctgcgcgcctgcaaaagcatccggcggaactgggggctgtatttgctgctgcttccggcggtggtgctgctgttctgcttcaattacctgccgatgtacggcgtgcagatcgcgtttaaggatttcaccccggcgaacggtattgagggcagcccgtgggtgggctttgaaaatttccagacgtttttcaactcctaccaatcgaagaacctgatctggaacacgattacgctgagcctgtacagcttggttgccggctttccgttcccgatctttctggcgctgatgatgaatcagatccgtgccaagcgctttaagcagacgctgcaggtggtcacgtacctgccgcattttatttccaccgttgtcatggtgggcatcatgctgattttgctctccccgagcaacggcatctacggcaatctggcgcatgcgctgggcatccagaatccgccgaacatcatggggcaggccggtgcgttccagcacatctatgtgtggagcgacgtttggcagcacgcgggctgggacagcattatctacattgcggcgctggcggctatcgacccctccctgtatgaggcggcgaccgtagacggcgcgagcaagctccagcggctgatctacatagacctgccgtttttgattccgaccgccgtgattttgctgattatgcgggccggcaatgtcatgaacctcggctttgaaaaggtctacctgatgcaaaaccccctgaacacctcagtcagcgaggtcatctccacctatgtgtacaagatcggcatgatcagcaaccaatacagcctgtctgcggcggtaaacctcttcaacacggtcatcaattttgtgcttctggtgctggtcaacggcgtttcgaagaagctgggagatacgagcttatggtgagcggaaagcagacaaggcgaaatttcacggagagaggcggctggtttatatgacacaggcaatggcaaaaggaaaggggcaggcaagcggcagggatatcgccttcaacatattcctgtatgcgctgagcggcatcattctgctggcgatcgcctacccgctgtattttatcatcatcgcgtcgttcagcaacccgtccgaggtggcgaacggcaacgtatggctctggcccagccagttcacgctggacggctataaggagctgctccggcacgacgatatctggaccggctatctgaacacaattctgtatacgctggtgggcacgctgatcggcttgtttgtgaatatatccgcagcgtacgcgctgtcccgccgcgatctggtgggccgcaggctgatcacgttcttcttcatctttacgatgttcttcaacggcggcctgatcccgacctatttcacgatacgggatttccacctgtacgatacgttttgggtcatggtgctgcccttctcggtcgcggtgtacaatatgatcgtggccagaaccttctttgacagcagcctgccgaaagagcttctggacgccgcgcagatcgacggctgcggaaacctgcgcttctttttctctatcgcgctgccgctttccaaggcggttatcgcggtgatcgccctctatatcgctgtggcgcagtggaactcgtattttaacgcgctcgtctatatccgcagcgagaatttaaagccgctgcagctcgtggtgcggaacatcctcatcacgaatcagtctcttgtaggcgccggagacggcctcgcggcgcaggaggccatgcgcctttccaacttgatgaagtacgccgtgattatcatcaccactgtgccgatcatgtgcgtgtaccccttcgtgcagaagtatttcagtcagggcgtgatgatcggtgccatcaaggggtgagcgcctctcttttcccgtgtgacgatgccgcggcagtgcgctgcggcataaaagtcataaatattcaaaactgtaaggagatgcaaacatgaggaacaaatggacacgcgtgggcaaaacgctgctctgcctgacgctggcagccgccctgctcgccggctgcggcagtggcggcggaagcagcaccggcggggattccaagccggcggagggctcttcgggcgcttccgcggcggcagagaatttcaacgagacgggcctgcccatcgtcaacgagccggtcgagctgaccttcctgtacgtgaagggcgccaatctggccgactttgaggaaaacgcgatgtttcagcagatggaagcggatacgaacgtcaagatcaactggcagtatgccggcgacgcggattgggccgagcagaaatccctgctgcttgcaagcggcgatctgcctgacgttttcttcggcagcaactcgctgaaagacatggacatcgcgaccaatcaggacctgtttatcccgctggaggagtacgtcgagaaatactgcccgaacattcaggctgcgtgggaggccgagcccaccatgcggaaaatggtcacaaatccggacgggcacatctacacgctgcccggcaagaagcccctgcgcccgaagggctgcgacacgcccttcatcaacaagacgtggctggaccgcctcggccttgaaatgcccaccacggtggacgagtggtacgaggtcttgaaggcgttcaaggagcaggacgcaaacggcaacggcgacccgaacgacgaaattccgctgaccggcagcgcgaagcagaaccttttcgactggatccgctatatcaacccgtggggcatcaccgacagcctcgaggagaactatatggcgctcgatcaagagacgctcaagcccgtattcatccccgcggacgagcgctataaggaggccgtggccttcttccacaagctgtatgccgagggtatcatggacccggaattcatcacgcaggatggctccatggccgatgcgaaaatgaaaaacgaggaggtttccctcgtgggcaccggcatcacgtgggaggttacctccgggactcagccgcatcaggacgaatacgttccgatgccgccgctggccggtccgaacggcgaccgctatatccgcggcaacgacgagacgatcacgtattcccgcaatgagttcaccgtgacgacagcctgcgaatatcctgaggtcgccatgcgctgggcggattacttctccaccgacgatatttctgtgcagtcttattgggggccctatgatgtcgtgctggaaaaggacgccgacggaaacatcactttccttgatccgccagagggcaagaccggcgaccagtggtactgggagatctcgccccgcgaccacggcccgaagtatgtgagccctgagtttgaggcgaaaatcgttcttcccgaggacagcggcgacggcgccaagctgaaggaggacgagatcatgaaggaatatgtcgcaaagccgtatccgatggtcaactacacgagcgagcaggccgaggaaatctctgctctgaccgtggacatctacaagtatgtcaatgagacatgggcaaactggatcgtcaacggcggcattgaggagcagtgggaggcctacgtggatcagctcaaccagatgggccttgagcgcctgatggagatctatcaggaagcgctcgacgtctacaataacgcgggctgaccgctcccgccgtttccaaaataaatctgcggagtctggagactgccccggtctccgggtttccgccttttggcgggatgggctgcacatggcccgcaaaaaacagagaggatgttgaatatggaaaagaaagtatttcgcgtgggcagcgtgggcatcggcggcatctcccgcggcgtgcatctgccgggcatcgagaaaagcccggacctgcggctgacggcggtgtgcgacctaaagcccgagcgcatggcctatgcgcgggagaaatatggggtgcccgaggcaaattgcttttcggattaccgcgatctcgtgaactgcccggatgtggatgtggtggatatttccacctccaacaacgcgcactttgcagtggcaaaggctgcgatcgaggcgggaaagccctactgcattgaaaagcccgtcaccctaacggcggaggaggcggatattctcgcgcggatgaccgcggagcgcgggcttcccagcatggtatgcttctcctaccgcttcaaggctgcggcgcgctatgcacgggagcttgtggagcagggcatgctcggggaaatctaccacgtttacatgcagtatttgcaggcgggcggcggcccttcttacgatctgccgcgctcctggcggtaccaaaaggcgctcacgggcaccggcgcgctgggcgacctcggctgccatgcgctcgatctggtgggctttgtcaccggcaagggctaccgacgggccgtgggccacgcggacacctttgtgcacagccgccgtctcgaggagggcgagggtatgggcccggtggatgtggacgacttctgccactacctgatggagatggatgggaaaaccgccgcgaatttctcggtcacgcgcttcgcttacggccgcggcaactaccagcgcatggagatctacggcagcaagggcgcgctcgtctacagtctggacgtgacacccggcgtcgatgcgcttgaggtctgcatcggcgcgccctacgaacgcgtcggcgcctttacaaatctgcccgttccggagcgcttttatgccgaccaaatgcaggcgtttgcagacgtgctcaacggctgcggcgacgggacggcggccaccatcgaggatggacggcgcatccagcacgcactggatacgatcatccgctcggcggaggaagcaaggtggctgccctgcggcgggcagaaaaccctttcataacgggcggagagggcgggccggtgtgccgctctgccgtgaaaacagcgaaacgcgctttccaacgggagttgaaaagcgcgtgtttgcttcctgttttcatgtgtcttgcaaggggaagtcagcctgcgttttgcagaatctccgcggcctgctgatagcggctttccttccagtccagaaggagccggaagtcgccgctttgcagctcgcggaccgcggcctcgtatgcaggcgcgacctcctcgggcgcgcagtcctccacaaggcggacaacctgcgttccgcagtaggtttcccggcgctcggcggctgcggcaagccgtgtgttggaatagtgcgaaaacaggatctcatagtgcgcggtcggaacgatatagcggctttctacgtcggcggtctgcggctcgtccgtttcagcggcggcgctctcaagccccgccgcctgaagaaccgccttctgttcttcggaaagcggcatattctgccggtaaaaggccgcgagcaggcgggcgagagcctgcggataggcgctctcttttaagaacagcgtggaggcgtactgctcgttgaaattgctggcgaaagcgggctcccgcccggaatcggagtgcaggggcgatacggtctcgtactgctccaaaacaggggaatcctccggcaggcaggccagcaggcggccgagctccggcgaagcggcgagaaagagctcgccgttctcgagctgtgcgaggagcgcttctgcgctgagggtgaaaacatccggcgagagcaggcgctcccggtacaagctgttcatgtattcgagcgcctccagcgtggccgggtgaaaaaagacgtccgtccattcgccgtccgacacggcggcagccccgaacatctgctgcaggcttgaaaattccagatagcaggggacgagtgccggttcggttttccgaatggttttgagctgctcgagcacctgcgctttttcctgaaaatccgcgtccgtccagtggaacttttcgagcatgtcgcgccgggcgatcatcaccgtatcggcgctggcggaggtgtcctccgtaagaatggtgctcgtgtgggggtaggcgtacactttttcccgcatgttgccgcaccaccggacgaaatcctccggcagggtgaagcccggaagctcgcggtcgaggagatcctgcagggcccatgccgcgccggtggtttccagccgcttaaagctggggtccgtgtaccagcaggtgaccgcgtccaccggtacgccggcagcggccatattcaggaatttttccatggtgcagaaggtgatttccaccggcatgccggcgagcgccgcgcacgacgcctccgtggggcagagcgcgcggcaggcttttccgccttcgccgtagggggtgataaacgcccattggagggcgggggattcctctgtgcggacgacctcaaagggcttgtgccgcgggcgcagaagcgggaatgcagccagcgccagcaggcagacggcggcgaacatgaggccgatgcgccggccgcggtgaagcccgccagtgcgcgtgcggaaaaatgccatggcatctcctctcctttcgtgaaaatacaccttaaatgtccggaatgacgcgggaaaatggacgctttgatccatttaatgatagtccaaaatcagggaaaagtccagcggaaatttctgatcccgcggatcgctggcgttcccgcctgcattgccggaaagggggccgtgtatgaagcgctggtggaaccggctgaaaatctcgcataagatcatactgggctttttggggttgatcgccctgccgctttcgctcctgctgaccttcaatttcttctcttttacggcgcagtacgaacagcggctcacccagagcggcagggatatgcttggcatcgtcgtgcaggacatcaacgaaaagctggatcacgtcgagatgctggtgcaggtgctggcctcgaaccgccggctcgtctcgtttctctcccgcgattacgagggggcggcctcctatgaggagtacacccaaaccgttctgccgctgctggagggggctgggaacacggtgaccccgccgatcgagcgtattttgcttttgacggataacggcacgatccccgagggctacggtatggtgtaccatatggatgccgcgccggagagcataccggagtcgcttttggatggcggcagcgcggatgtgtggtatgtgacggaggaggacggcgcgcaggtgctgtattacatctgccccgtcctgtcgtcgccgcgcaagagcgagggctatattttggccagaatgctgggggagaagctgttttcggagatccgcatgctgcaggagggcgaaaccgcgctgtttttactggatgcggagaaccggccggtcttttccaacgtgcagaccgacgcggatttccacttttcggaggagacggcggcgcagggcactgtgcggtatttctccgccccgctcgagcggctgcccctgcgggtgggtgtggcgctccccgccggggagaacggtattttgcagcggaattctctgctcacgctggtgctcatggggctgctttcgttcctattcctctcgcttttttactcgctgctccgctccgtgatcgcccggctgcgccggtacggcgacgatatggagcgcattgcggccgacgatttcaacggcgcgcttgcgattgaatggctggacgagatcgggattatcgggcagcagttcaaccgggttctcgagcggatgcacgcgctgatgcaggagaatatccggaaagagacggcctacaaggacgcgcagctcaaggcgctgctcctgcagatcaatccccactttatctacaacacgctcgacatgttcgcggggaagctcacgctggacggggaatatgagcttgcggatacgatgtgcgatttcgcgcagatgatccgctacaacacggtggcctccggcacatcgctgccgctgcgggacgagctggagcacgtgcggaattacgtgagtctgcaaaggtgccggtacggcgcgcgcgtcgtgctgcgcattcacgcggcggaatcgcttctcggcgtttctataccgcgctttctgctccagcccatcgtggaaaatgcgttcgagcacggctttgccggccgggcgccggatgcggagcgctgcattgtggtcagtgccaagcggctgggaaagcggctgatcctgcgcgtatgggataacggccaaggcatggaaccggagcaggtggcggagatgaaccggaagttcgctctgccctatgatgcgcttgcgctgcgccacgaggaaaagcggggaatcgggctggaaaatatcaacgaccgcctgcggatttttgcgcgcgccgacgaccggctggtgctgcgcagccgcaggggccggtatacgagcgtgtttgttctgttggagctgtagggtgcagggcggtccgtgcggcagaaaatgggaaaactttgtgcggaaaggggcgggaacaaatgctttcaatcctgattgtggacgatgatcctctcttgtgcgcggcgatgcgccgtaaaattcagatggtggatcaggagaataagctgggcattcgggaaatcacagcggcgcattcggtgcaggaggcttgggacgtgctgcgcggccgaacagtcgatgtgctgatcagcgacattcagatgccctatcagtccgggctggatctggtgcgggaggtgagccgcacctacccggagatccagatcgtgatcctgagcggttacgacgactacacgtatatgcggggggcgatgcgcagcggcgcggtggattatctactgaaaccggtgaagctggtgcagattcaggaggtgcttctgaaatgtgcggagaatctgcgcgcgcggggcggacaggccgccgagagggacggtctgagcaggctggaggactggctgaacgggctgcagcgcggggagagcggcgagccgccggatttcctttcccgcccggtattctgggtggcgtggggcttcggcggacaggatgcgcgccgagcggcattgctgcgcggcttttgtgtgcaggcgcaccgggatgatgcagacctctatccggtgcagagcgcggacggcgattccgtcctgcttatcaatacggcgggccgccgggcggagacggtggaagcgtgcctgatggcctgccgggccttttgtgccgcagagggtgcggagatctgctttgccgtgagccgcccattcgatgacccgggcgcatacccggctttttacaaggaggcccgctatactgcggcctaccggatgctggagccgttttccattcggtttgccgcgccgcggtggactgtggagaggagccggcttccgcggtatcaggcgcgggttcacgctgcctttcaaagccggaattttgcggggatccgcgagtggctgcaaaaaatcttctgcctcgatttctttcaggcgcagccctatcccgaggagatccgcgggttttacaattactgggtctcgcagatgcaggagatggcctcagcctttcacctcgagctggagccgtttccgcatttcacgcgatttgagagcctcgaatccatgcaggcatatctgcagagcgcgctggaacgcgtggaggcggcgggaaacgcctccaccgacaagtacgcctacatcctgtccaccgcgatggaatacgtggagcagaactacaaccgggagatcagcatgaacgaggtggcggagaaagtgtcggtcagctacaattatttcagccgtctgttcaaggcgcagatgaaccagagcttttcggaatatgtggcgtccgtgcgcatgcgggaggccaagcgcctgatcgaggaggatccgtccatcaagataaaagatgttgccgcgctcgtcggctacgaaagcgtttacgctttctcccgggccttcaagcagtattttcacgtttcgcccaagcaaaagcgcgctcggtgagcgccgctcgagaagtgtgccggacggcctgtgggaaatggcaggataataacaaaaaagaaattgccccgcattgtgtaaagcacacgatgcagggcaatttcttttggaaaatttgatgcctgctttttatctgaagtctgaaatgaccgctgagatgctgaaatcgtgcgcaccgggccgatttcataatttagaaacatttccgaatcaaatcaaaaacacaggcgctttaagatagaggcatcaaagaaacggtcacagaaacaaacggaggtatctgaaatgaagaaaaagaattttgtatccatgatcatgggaacgatcggcggcgttctgttcgcgctgggcatgtgcatgtgcctgctgccggagtggaacgcgtttaatcagggcgttgtcatcgctgcggcaggcgcagccgagcttctggttatgctgcttgtccgccgcaaaatggagggcaagcccgccgtccgcctgagcggcaaggttatcggctcgacgctgcttggcattgccggtgctctggcgctcggcgtcggcatgtgcatgacgatggtgtggagcatactgatccccggcatactggtcggcctgaccggcatcgtgcttctgctctgcttaattcccctcgtcaagggcttgaagtaagggaggggagaacagatgtcaaaattttttatctcagctgcggccgctgcggctgcactggtcggtatcgcggcggcagcgatttgtttcgtgcgcaggcgcagaaaatcgtattcggattaagggggaaatttatcgtggcaaaatcaaagctgatcaaggcgaatgaaaagatcgccgagggtgttgtgggcggctacaggaaaatcgagaacggcgttgtcggcgggtttacaaaaatgaccgacaagtttgtggatcagttcctgacaaaagaaggcgagtccgtggaggacgcgaagaagcggcttgcagccgagcaagcggcccgtgaggcggctgtaaaaagatagaaacacgggggacggcggctggtgtgccgtccctcagccgcttaaaggagaaaaatccgaaaaaatttgcgcagtggctcaaacgcaaacaaaaccttaacaactctatgctatactgaaaaaaacatgaggaggcgcatggggatatgtttaaaatattagttgtggaggatgaccgggatctgaaccacgcggtctgcaattttctggggcagaacggctacgaggccatcggatgcctgagcgccaatgaagcctacgacgccatgtatggcggcacgctgtttgacatgatcgtttccgatattatgatgcccggcgtggatggctttgagtttgcgcagaccatacgggagctgaatcaggagatccccattctttttatgacggcgcgggatgatttttccgcgaagcagcggggcttcaaggcggggatcgacgattacatggtaaagccgatcgacctcgacgagctgctcctgcacatcggcgcgctgctgcgccgggcgaggatcgccagcagccgcaggctggaggtcggaaagctcctcttagacgccgacgagcgcactgcgtatctggacggcgaggaaatctccctgacggtgcgggagtttaatttgatctacaagctgctctcctacccgaaaaagaccttcacccgctcgcagctgatggacgaattttgggatggggataccacctccggcctgcgcacggtggacgtttacatgacgaagctgcggaacaagttttcgaaatgcgaggatttcgagatcgtgacggttcacggcctcggctacaaggcggtgctgaaatgaaagcgaagcaggcgcagaataagcgctttccgtaccacatctttttcatttattttgggatcctgctgctgatgagcggcatacacaccggctttatcacgctgggcaatcagagggactggtcccctatcatacaaaccgccctgccgattatttattgggcgctcatcgctgcggcgctgacggcttacacgcgcgggacgatcaagcgcaactacgacaagccgatgcagaatatttctgatgcggcggaaaaggtagccaagggtgatttttccgtgcgcctgccggttttctcccgattgggctctgtggattatctggacaggatgacggcggatttcaacaagatggtggaggagctggccggcgtggagacgctgcggaccgacttcattgcaaacgtgtcgcacgaattgaaaacgcctttagcggtcatgcagaattacggcacgatgcttcagcagccggggctttccgagggaaagcgcatagaatacgccaaggctgttacggaggcttcccgccgtttggccgatatggtttccaatatcctgaagctgaataagctggaaaatcagagtctgtatcccgatgcgaaaacgtatgatttgggggaacagctctgcacgtgcctgctgggctttgaggagatttgggagcggaaagggcttgacattcaaaccgatatacaggaggacgtccgcgtaacggcggaccccgagctgctgtcgctcgtgtggaacaacctgttctcgaacgccgtcaaattcacggaggcggggggcatggtatcgctgacgctggaggtgcaggaggaaatggccgtcgtcacggtttccgatacgggctgcggcattccgtccgaggttggcaggcatatttttgaaaagttttatcagggggatacctcgcacgcgacgcagggcaacggtttggggctcgcgctggtgaagcgggtcatcgacattatggacggcgaaattctggtgaacagcgaggccggaaagggcagcgcctttaccgtccggctcaggagggagatggatggaacggtttagacgcatcgtaaaaagactgttctgcctgccgcctctcgcgacggtcctgatcgccgtaccctcctttgtatttgtgtttttcatgctgggcaccgggaataaatcgcccgcggcttatgcagcctacggcctttcggcctacgccatgatcatcaccgtgaccggcatcgccgggattgctgaggccgcaaggaacgggtgggaggaaatgccgctggtcaggaaaatccgcagcagccctatgggaagccgtctgcttggggatgttgcgttcagatcagagctccttctgcacggcgggcttgctgtgaaccttttgtacgcggcgctcaacctgtattccggcgtgcggtatcagtccgcttggtttgtggcgctggcgttttattataccctgctgtccgttatgcgggggtttctggcgggccggctgcaccgggcgcctgccgggcaggatctcccggcggagctgcgcagctatcgcatctgcgggatcgtgctgctcgttatgaatcaggcgctggcaggaatcgtcttttacattgtgaagcagaaccgcggctttacgtattcgggcacgctgatttacgccatggccgcctataccttttacatcacgatttcggccgccgtcaatgtggcgcggtttcgaaagcacggcagcccgcttctgtcggcggcgaaggccatcagcctgacggcggcgctcgtgtccatgctgtcgctggaaaccgccatgctggcgcagttcggcgcggagacaccgcggtttcggcttgtcatgaccgcggcgtccggcggggcggtgtgcgtgtttgtgctcggcatggcggtttatatgatcgttcgctccacacggcggctcaagagtctgcggccggaccgcccgaaacaatagcaatagctttggagaataatacacgccgcgcacgattgctgcgcgggcttaaaacaggaggttactactatgagcgaaaaaaaggatacattccatttcagctactctgcaaagcagcaggaggagatccggaaaatccgggaaaagtaccttccaaaagaggagaacaagatggagcagcttcggcggctggatgaaagcaccacgaggccgggcacgattgccgccataatcgtgggcgtcatcggcgcgctgctgctcggcgtcggcatgagctgcacaatggtctgggcggagcagttttttatcccgggcgttattgtcggcgtgctcgggattgcacttgtgggcgcggcctatccgctctacagccgcgtcaccaaaaagcaccgcgagaggcttgccccggaaatcatacggctcaccgacgaactgtcccaaaaataaaatagagctaaaacaactggtacgggagggatctccgctgtaccggttgtttttatattccgcaggctgcgctgcgcgccctgctttacgtctgctgtttcaaggggcgtttcacggtggtctccgttcctctcccgtatgtgctgctgacagcgatatttccgtcgtgcagctcgataatccattttacgatcgacagtcccaagccggagccggcgcggtctctggatctatccgcccggtaaagtcgctcgaaaatatacgccgaatcctcttttcggatgccgatcccgctgtctgaaaccgtaaaggtgcggcaatcggccgagccggctgccctgaccgtcgccgttctctccggtacgccgcatttgatggtgttcgcgatcaggctgatgagaagccgcccgcataaatcgaacaataaaattgcagactgcctgtattttgaggaggcgcagtaataggataagagtatacaaggatcttccgcgtctgctgatcgtgctggccgcggtctttatcgcgatggaggttctttactggtacaacccctataataactttctggggatgcgggcctctgccgcttggatgaccgcgttctgctgcctttcctttgttcagtccgcgcgggcgatcctctgcgagcggcggctgtcgggcaccgctgtgaagaagcagggccggggagacggaccgtgcccggtcccgccgtaaaccggccagcggcaaaatatttgccggaatccaatatgcggggcgccgtttaggagccgccgaatcaaaaggccggagcgattacgccggccttttactcatagcggatggctttaaattgtgcctttcccgaaaataacatttctataaacggaaggggaaagagccggtttataaattgtttaagagggatttaccggcgttttaacccttgcacgtacactggtctcgcattcaaaaaacgaaaagaaacggagattgaatttatggaaaccttgtttcagcctgcgccggaagccggcctcaccgccgagcaggttgcaagccaaaaaaagaacgggaagcagaacctccagccggagagagccacgaaaaccaccggccgaatcttaaaggacaatatctgcaccctgttcaatctgtttaatgtgctgattgccgctgcgctggcttttgcaggcgcatggtccaatatgctgtttatcctgattatcgccctcaacacgctcatcggcatcgtgcaggaactgcacgccaaaaagctggtggacaagctctctcttttgtccatgcccacggcaaaggtgatccgcggcggcgcggcttcggagctccctgtgtgggagcttgtggagcgggacgtcatcgagcttgaggccgggaaacaggtctgctcggattccgtcgtcctgtcgggcgaggcggaggtgaacgaatcccttttgaccggagaatccgacccgatttcaaaatcagccggtgaccgcctgctttccggcagcttcatcatcagcggaagatgccggtgctgtgtggagcatgtgggggcggaaaactacgcggcgaaaatcgcacgggaggcgaagcgcctgcgcggcgtgcactccgagctgcttgcctccatgcgcagagtcacccgctttaccggctttttgatcccgccgctgggcatcctgctctttctggaggcgttctttctccggggcgatgcggccgggcacgccgtcgtcaccacggcggccggcttgctcggcatgcttcccaaagggcttgtgctgctgatcagcgtcagcctcgcggtggggatcatcaccctttctaaaaagagggttttggtgcaggagctgtatgcccttgaggctctggcgcacgtggataccctttgtctcgataaaaccggaacgctgacccaaggcaggatgcgggtggaggcggtttaccccacagagctttgccatgccgctctatttgaggagtggatgggttcttttctccgccattcggacgacaacaacgccacctttcaggcgctgcaggcgtattttaaaacgaatatcgtgcgttctcccatgcgcaggatcccattttcctccgagcggaagtggagcgccatggaatttgaagacgccggaacctttgtgatcggcgcgccggagcggctgggcggcggccttcccttgtacctgcaaagggaggcgcaggccggcaagcgcattttgacggccgggctcgccaaggggccggtggagccgtcgcttccgctgccttccgttgaggcgctcgcctatatcgtgatttccgatccgatccgaccgggcgccgccgaaacgctggcgtattttcaaaaagagggcgtcgcgctgaagctgatttccggcgataacccggcaaccgtttccgcgctggcaaagcaggcgggctttccggaggcggagcgttttatcgatatgagcggcgtcacggaggaggccgaaatcgaaagggcggcccgctcttattcggtgttcggccgcgtatcgcccctgcaaaagaaactgctggtacaggcgatgcagaaaaacggccattccgtagcgatgaccggcgacggcgtcaacgaccttttggcgctcaaagaagcggattgcagcattgccgtggcggagggcagcgacgccgcccggcaggtggcgcaggtggttctgctggattcggatttttccgtcctgccggacatcgtcggcgaagggcggcgggtggtcaacaacatcacccgcgtggccggtgtgtttttcgtgaaaaccatttattctgtgctgctgtcgctggtttgtctggttttgaatattccgtttcccttcatgccgatccagatcactctgatcgacctcatcatcgagggctatccggcgttctttatgtccttcgagccggacggaaagaaaataacggagcgttttctgccctctgttatgcggcgcgcgattcccaatgcggcttcgattttggtctgcttcctcgtactgctcggcctgccgctgctcgcgccgatttcgcccgatcagcaggggatcctgctttacctgctggttggaacggtcgggattcaggcggtattcaaggcgagcctgcccctcaacaaattgcggatttttctctgcgccaccatgaccgtcggtttttacgcagcggttttcctcttccattccattcttcaggtggcgcttccggcggcgcccacgctgctgctgttcgtcagccttgcgctgttgagctttttggcggagcgcggtgcggacggggtggtgcgtctcgccgcgcgcgggaaaaacagcctgaccggccggcgccggggcaaacggcagacggccggaaaggggagggcctgacggcaggcggccgccctcgcttgcggctttccgcagccgcttccggccgccggtggagggcgccgggcgtgctgcatcggcggaggcggtccgccctttttgaaacagtgcaaaaggcatccggctgtgcaggcggatgccttttgcttcgcatattttgtttccgagtttaaccttattttatattttgggtgtataatgaaaacagaggggttcctatgaccataaagaaaaggctttttatcagcaacatcctcatgcttatcattccggccgtgcttgccgtttgcctgcttgcgggctctctgctgctgttcttttcctttgcttttccgcgctatgaatatgagctgagctttcagggggaattggaagaaacgcgctgcgaggccgtggcgctcgtatcgcgctggctgaatgcggtagattccgcgcggaaggcaggctgtgaaagggcgctttccagcctgctcgcggaaaacaaaatgacgctcctgctcgaaaatgaacgggaacccgttttgcagatgggggaggaggccgcttccgagacgcagctcgaggcggctctggcggttctccacgggagcggaacagtgtccgacggctctgtcgccttgttcggcacgcggctctccgccaacggggcggaatatcaggtgagcctgtataatccggtcgtgtccgtttctcacgatcatctcaagctctgggccttggggatctgcctgtttctgctggtctttgtgctgtttgctgtatttttgacaaaccgcttcctcacccgcttcgttttccgcaggatctcagaaccgctgcaaaccctgacggagggcgtccatcagattcgggacggcaacctgacacaccggatcgattatcgggaaaaggatgagtttcagcccatctgcgcggatttcaatgagatggcggagcggctgcgcgtctccgtggagcagacgcagaaggaggaggagagccggaaggaacttctggccggcatctcccacgatatccgttcgcccttaacctccatccgcgcctatgtagaggggcttttggacggcgttgccgacacgccggaaaggcagacggcgtatctttccaccattcagaaaaaaacggtggagatcgacgagctggtgcgcaagctgttcctgttttccaagatggagctgggcgaatacccctacagtccggagccgctggacgcggttcgggaaatcgtcgattttatccacgcctctgcggaggactatcaaaggcgaggcctcaccgtacaggcagggcctctgccgcagaaggccgtgatcgaggcggaccccgcctatttcctcagcattttgagaaaccttttggacaacagcgcgaagtataagaagaaggaaatcggggctgtttggattacgggggaaacggccggcgcacaggtccggctgtatgtcgatgacgacggccccggcgtgccgcaggaggcgctgccgaagctgttcaacgtgttttaccgcaacgatccgtcccggagaaatcccgatcaaggcagcggccttggccttgcgatcgtgtggaaaacggtggagcggatgggcggcgcgatccgcgcggaaaaccgcccgggcggcggcctgcggatggtgctggaaatcccactgatgaaggaaggaaacaaagatgaagcggattttgatcattgaagacgacgagagcatagcggccattgaacgggattatctggcggtcaacggctttgaggcggacatcgccgcgagcggcacagaaggggccgcgatggggcgttccggccggtaccagctgattttgctggatctgatgctgcccggcctagacggctttaccgtgtgccgcaggctgcgggaaacgctggacatccccattttgatggtgacggcccgtcaggaggacatcgataaaatcaaggggctgggcatgggtgcagacgattacatcacaaaaccgttttcgcccagcgtgctggtggcccggatcaaagccaacctcgcccaatatgcgcggctgaagggggacggcggggcggagaagccgaacattcaaatgggcgatattctgctgcaggagagcacccgacgggtttttgtgagcggggaagaggtggagctgaaaaacaaggaatacgagcttttgctgtttatgatgtcaaatccggatatcgttttcagccgggaagccctgtatgagcggatctggggctacgacgccatgggggataatgcgacggtggcggttcacatcaaccgcctgcgggaaaaaatcgagcgggttccctcagagccccggtacattcagacggtttggggtgcagggtatcggtttaagccgtgatctgcattgtaggagggaaaataaaaatgctttggctgctttttgcattcggctctgcctttttcgcgggaatcaccgcggtgctggcgaaaatcggaatggaaaagatcgattccacgctggcgaccgcactgcgcacgatcgtggtgctggcattctcatggctgatggtgtttatcgttggctctcaaaatcagatcggagagatttcagggaggaccctatgttttttggttctgtccggactgtctaccggcgcttcgtggctctgctatttccatgccctgcagctcggcgatgtcaataaggttgcgcccatcgataaatccagtaccgtgctgacaattctgttcgcctttctgcttttgggcgagccggtttccgccgcaaaaatgatcggcattttgggcatcggcaccggcacccttttgatgatcgccagaaaagggggagacaaaaatcaggtgcggagcagaagctggctcctgtttgcagtgctctcggcggtgtttgcgagcttgacctcgattttcgggaaaatcggcgtcgagaatatcgaatccaatctgggcacggcaatacggacggtcgtggttctggccatggcttgggtgatggtttttgtatccggaaagcagcgtgagatgaaggggatcagcaagaaaagctggctgttcctttttctttcgggcatcaccaccgggctttcctggctgtgctattaccgcgccttgcaggacggcccggccagcatagttgtgccggtcgataagctgagtattgttgtaaccatcgggttttcctacatcctcttgaaagagaagctgagccggaaagcgggcgtagggctgcttttgattttgctgggtacgggtgtcatgctgctttgaaacggctgttttcagtggtctgcataagttccggcggacgggccgaacttcaaaattttaatctccaaattatcgttgtaaaaaaaccgacatgtcaaaacatgtcggttttttgggggaagggatagacgctttagatgctgcgttttataagaaaatgagaattaagttttaaccgtgatatatcttcatttatcaatgaaggaacctttttttctaactctgaatttgtataatcttttattttcataacaaaccaattttctggattaattatttcaccagttaaatcaaattttatctgagatataagcaacgacaataatgtaagcaaacgaaatttgtctatcgaagtatcatctagttcataattcatatgttgcatagtaactgctatttttattgcatcagcagtaccataagcgtaaattttatgtaacaatgcggcataatcctgagttttcattgttccgtctttcatttgatctaacatgtttaaaaggagaaatggtatatcttccattttttctaaaccaatagttgttttagcttttgatatctctcccttaagattgcgctttgttaacagatatgtcacaataaagcctattaaagtcgttactatagtcccaatccctatatatagatccgtgttcacactaattcctcctatagaaaagccgacatgtttcaacatgtcggcttttagttggaaggggtggacactttagatccccccttgtattcaactgagaaacggcaaaaaacttaaaaaataaatttttttgcccaaaattttgcgcttggcttaaccgggatcatggtaaacactgcaacaaaatttccgtgtagttattatagcatacgtcccaagtcctgtccagtcttttcgacaaaaaaatttcaggagatgttatggtatgttaagagggttatgggccaaacagttacccacaaaaaaatagcaccgatgcccccggattgaggacgtcggtgctatttttttgcaggcaatctattttttcaatggcaggtttgcgtcctgctcatatccgccgacaaaccgtattctgatttgggtggcagagagaactgttatctgttcaataattcttcggataaagtcatcgttaaattcagtaaggttcaggttttcctcattgttgatataaagtaaggcttgttggtactggtattcctgtgcccgatctgccatcttctttttctggatttcctgcagttggctggtaagccccattttctgttcagaaagttgccgtaacttggcggcatagaattcgctatcgccaccctgtgcgataattttaactaaggccgacatttcctgctgcagcttgtctatttgcttttccagtgattgcggtgtgatttgattcccggaaaacaggataatgttttcttgaacatcacgcagatttttcaggatatcttctttgtccccgaccactttttgaatacattggaggattgcctgatgcaaggcttcttccgatatagttggtgaatgctggcagtattttgttccgaattccaatcggctgatgcagcgccagactactttcttcttgcccttttttacccaagtggtccggcgatacatggaaccgcattccccgcaaaccagcctttcggaaagtgcatacttgctgcagtatttgcccagcgcactcttggttttcttttgggaaaccttctttttgctgttccttctggtcagttcaagctggacatttaggaaatcctcacgagagataatcgccggatggttgtcagtgatgtaatattgagtgagctccccgttgtttttcttctttttcttggttaagaaatccaccgtgtaggtcttttgcaggagaacatcccccatttatttttcatttcgcaggatatgttcaatactggacaatccccattctgtattcccccgcggcgtcagtatgtttcgccgttccaaggcttccttgatctggcgcaggctgcggcccagcaggaacaggttaaaaatcattttgatatgttctgcttcttccggcacaatctccggctctccatcctctccttttttatagcccagcatattcttatagggaaaggcgaaatttccttgactgtagccttttcgtttaccccatttgacattgttgctcagagattcgctttcgccttgggcgaaggcgctggtccatgtgaaaaatatttcgctggttacacgggaggtatccagcccttctttttcaaaccggatgataatgccccgatccttgagcattcgtatgtacgaaatgcattgcagggtatttcgggaaaatctggatagcgactttgccagtatcatgtcgattttcccttttttacactgctttatcatttccataaaaccggggcggttctcatctctggttccgctgatgccatcgtctgaaaaaacgccagcatattcccactcaggatttgaacgaatcaaatcatcataataggtgatttggttttcgatactggtctgctgttcttcctgctctgtactgactcggcagtaagccgctacccttagcttgtgattgcgggttcgggcctgcagcactggggagggtttaatctcccggatgattttctgcctgatgggggcttgtggctccatataaacgctcctttccggtaggctatatcacttttccgtttcgcagttgaaggtgaacggaagcatttgactgaataaggattttctctgttatgctgctaaacaggtcgtagtcgaaatcggaaatcagggattgatcggccagccgttcctgtataagctgagtcatctgctccgaagcaccactttcgctgacttcgtatttcgctttggcacaatccatgataagctggagcagttgatccgcattagcgcggggattggtcatctgccggtcaatttcattgttcaaccggaggacttcgatggataagcattcacaatgcctttcttccggtttcagcttttcccggtttttaattgcccggtttaatagggcagtcacgctttgcagcaatagttcgtctggtatgtagtctgtgctgattccgcattttggacattcccacaggatgtatcctgtccgcatattgactcgcttgaggatttgcccacagtttccgcagcagatctgctggcggatttttttcatttccgcaggtaggctgccgccatattgctttgccttggctgctctgaggaaagctgcttcttccaactgttcctttgaaatcagcggcgggaatccttcatcgcctgcatacttggaattgtccaaaatccggcaaaccatggctttattccactgcccggctccttcccgataaggaatgcccgacaaggaggcatatttggcgagtgttgaaagggcggtcctttcaaggtattttgaaaagatagcctgtaccaaaggtccctcgtcagggtgcgggatgatttctcccttttccatttgatatccgaagggcaggtatcttttctttttcattggtacaactcctatcttctttcagccaattccatcccgttgattaaccggaaacagatggtgtctgaaaaaatcctcactttaataaccatattgcggaaagctacaggctcaaactctgagatgctttcctgctcttcaaaaatttttagaagcaggtagcttccattgagtatttcatggtagtcgtttaagtcacggtatcgctggagctccttccgcaaattttccagcttggtgttattggtattggtttcactcatataaaaagcagaatcaatgcactcttttgctctcaaagtagccagcgcatgattctgctccaacagatccgctatttctttgttcaactgcatggcccccggatgggacatgaaatttttatcacgcagtttttccacctgcgtaatgaatggggttaaaatctctgagcgatttctccccagcttgttatataaggtaacgaatgcggattccacttcggactcctgcacattttctatggcgcacaattttttgtcacggaaatgccgataacaggcccatactacagttccggctttggttacccgcctgcagaatgtgcttccacactcgctgcactccaacattttggagaaagtataggtctggatttcctttttccgtccatggagttgatttttcttttttagaagttcctgcgccagacgaaatacattggggctgacgatagcttcatgggtattctccgcataaaattggcttttctcgccacggttctttactttcttaaaaggaaatgcgtcagtggtgaagcgtttctggaataattcatctcccatatagcgttcgttggttaaaatataagaaaccccggtggcactccacacggggttccctttcagctttggcacttgggcctgtgcaagttcattggcgatttctcgaatgcttttccctgagagaaagtccccaaatatctttcggacaaccttcgcttcttccgggcaaatcagaaaaccgcctttttcatctaagcggtagccataaggcgcttgggatagacggtaggttccatttttcatccgcatgactgcgcctttacgcatattcttcgcaatggaagtggattcttcttgtgagaatgcactgtacatggaaaagtacatttcattggtcatgcggcctgtatcaatgccttctttttcaaacgcaacagctattcccaacattttcagttcccgaacggcttcaatgcagtcggcgctgtttcttccgaatcgggaaatggatttaaccagtatgcggtcaatcctcccagctctgcagtcccgcatcatccgttggaaatcgtcgcgcttgtcggctctggtaccggttatgccctcgtcagcatagatgtcaatgaattcccaatcgctgtgggcttgtattagttgggtgaaatattcgacctgcgcggaaaaagagttcaattgatcatcggagttgctgctcacacgggcataggcacaaacccggattttctgtttctgtggccttatcgtaggttctatgatctgtacctgtggcattctccgcaccgccctttctgcgctttcttgggcggcatctattgtgaccaccccgcagcaacaacactaccacaacggctggtacaaagctatcacgacaaccactaaatatcgtatcgcaaaacccggtatctttcggcaatagcaacagtcgctttcttgtaattttcagaggttatgacgctatcggccagcatctttttcaaggccgaaagcgccatataatatttaatttcattgactatgagaggtgagggcgcttctggattgtaagtaacacgcataaattcagcccccttcaccatggcaaatggaggccctttttggctgccctctggaaaaagcggttttccagtcccttgatgtaaagctcataccgcaggtcgctctcggtggtgatcagtaccgcgtcgtgatcctgcaaaaattccagtatctgaatcaggatggcgggatcgtggctcaggcgggataaatcccgcacaagcacagcgcggacgaagccgccctgcacactccgcagcatctgcttcaggcccatgcgggctatgcttctgccggtacccatatcctgagaagtacctacaacggtatattcccgatgattggcttcctctaagagattccgcatctgctgaatcaggacgaacatccttttatcgctgctgcggctgtataaccacatggggcggtctgcgtagggaaatcccgccgtttctgtttttctgttcatctatgtcaatctcctttatggcataaaataatccgggcctttctttgcccggatgaattcctccacatcttcgatttttctggtgagccgaaggttcggcagggtttccagcacagccttgtgataccgttctccgggggctgcccgatagtccaaaatgctcaccacgcaggtgtcggtttcggtgcggatggcccgaccgaagccctgccgcagctttacctgcatatccggtataactaccgtcttgatgtaatcctgcagggttgggtactgctcccgttccgcttcgctcaatggatcgggaacagggaacggcagccgtacaagtatgagcgacgacaccatatctccgggaaaatccacaccttcccaacaagagcccgccgcgaacagcacagcgttgctggcctgcttgaactggtggatgacgtcctgcgagtgccgccatacttccatcaagggaaaagacagccggtcctttacctgattgtaaacagtgcccatgagggaataggaagtaaaaagcgccagagtgtggccatgcgtggcttccaccaaccggcagatctgctctgccagacacttagcttcctgttcgctgcccatctgtgttttgggaagatcatttgggatgtaaagaaggcagtttccctcgtaattgaagggcgaaaccgcaataaaatcctccagccgctgatttgaggacaatcccatgaccttttttgtgcgctcaaagctgccgccagccatgagggtgccggaggtcaggatggcggggatgtctttcagccacagcgcccggcgcagctgctccggcagttcccggctggcggcgcagaggctggggcttccgtccctgtcgtactggatgtagaggatgtattttcggtcccctgtaaaaaacagtccgagggcctgctctgttgttcccagccggtaaagaagccaccgtgggaggtgcggggcaagctgtttttgaagctgccggaggagggaaaggcaatcccgaagggccgcttcccgatccggcgttaaaataaaggcggtgcgctgggcttcttccagcagttcgccccggcacatggcccccatgagagcgcggaacttttcccgcagacgctgggaagcaaggatatatttttcttttgccagcaggtcgcagagttcacggaaatcctccgcagacaaactctgcccgtacatttggcgggctgcatccggcagcttgtgggcctcgtcgatcaccaaagcccggtaatcattgagaaggggccgcatttcctgcaaacggtgggcggcgtcggccagcagatagttgtgattgcagatctggacgaaaatctccgcgcttctggcttccttcaggtattgatggtaccggcaggcgtttcgcaaaggacagcttttctcgcaaaccttggggacgcacacctgccgccgatcaaatccactgaggccggttacggcgtctaaatcataatagctgcgaagggaaagcagggctttcatctgctccgcattctttttcttttcccgaacggcttccaaccgccctgcaagacgggcatcgcagacaaagcgttctttcccttttcgcaccatcgcccggatgggtttttgaataatgcggttctccagaaaaatccgggataaaaacgggatgtattccccgatgatagcgtcctgcagagcaacgctggaggtggagaccaccaccggctgggaaccggcaggcccatgtggggcaaacttcttcagtaaaatgcaggcggtcaggtaggcgtaggtcttgccgatcccgacgcccgcgtcgcatagagcgatattgtttttgagcagggtatccagcatggcgtggcagagggtaatctgttcttcccgaactgccagcccgttttgagggagaaggattcggaagatccgttcgatctccccatgggcctgctctttcagactcttgttcatttcggcacattctccttagagcaatttgctcttgtgcgttggcggcaaactaatgcggcgcagaaaacctgcgccgcacggattcgccgtcaacggcaatctgaataaaaataaaagggttgaatttgatgtgccgtatttgctgctcgccccccggcaaccttgggaaccatacgggcaggcttgcagttgacaagccgttcactggctccccgaaggtcttgctgattacaacccaaggtcggccagcccatctgacgtgtgggcaaacgatagtgtgtatcataatcccccgcccaaggtcgtggcgaaaagggcaactaccccctctttccggtcaaaatgcatcgctcaaagccaacaacacaagccgccatccctcatccctgaaaagggaggcagcttgcgtgcgactcgtcatggcgctttttcctgtgtcgctcgctcaggcgggaacgtacccgcatggctggtattcacttttcaagctgcaaggcgaacgtttctttttccccgttcgccctatagcccaggaaaaaggccggaatctttccgcttataaaaaattttttaattttttcttgagtttgaaaatccgcagatcaatggcgtttactgacaggccggttttctctgagatttccttgctgccgtatccgtccatcttcatgaagaggatttcgagggtgagcttgtccacattgtgcagcaaagaaaaaagctccatatcctcgatgctgtccagcagggcgtcggtatcctcgacgggcagttccagatcctgtgcggatatgagttccacatagggagaccattccacctgtcgctgcaggtactgccgttccttattgaactgcgcccaatcgtatgtatgcaggcgttggatggtgtcctcatccacgccgagttctctgagttttctttcttctgcttctttccatttgagccactgtttttcggctctggctttgttgtaagccatggctgtttcctccgatcaatctgaaattttgaaaaattcagattgtcggggcggcggcctgccgctatgagttcttagccatgacctccttctgaaagcatgaaaaaagcgcacccgcccgcaggcgaatgcgcatagcgaggctgcttcctcgaaattggtatttaatggtaaatcaaaacaggataatgtcgaacgaaaaagggctgcagtttcatacgaagctgcagccctttctgtgtgcggtggttttcgccgcattgtcgccatcccctctgcatggggaaagcggacgatgttttattcccatatttccccatataaatttagatggggacagtataaaagagaaaaactacttttctgattcgattctcctttcatttgcatatttcgtagtgcttttatctacattacatgacaaaagaacaaagatatttatttaatcaaccaaaaaggtaaaacaacagcctttattctctttacaggtaccttcaacgatccggcaggtggggttcgatttattcaggccgagtttttcctgcaggcttcgcacataggcggcagcttcttcctctccatgctccgaatctggatgaagccaaacggcattgtggagaaaagacgcagaaagggcctgattcgggtgggaagcaaataagccgaggatttcgaattcccgatggtttagttttacagcattaccatggagggttacttcccgcttgggctggtcaatccgcaatgagccgaattcataaacctttcccggccctcggaatggctggtattggggttcggcaataatgcccttgatctgctcaaccaaacggtcggcttcttcatcactgcattcaatgatcattacttttggcatttggatgctcctttcggtgtatgaattctggatatggatttctcttgtataaagggttttgggcatacgctgccgcaataatggggatgtagcccaatctgaccttttgaaaccgtcagcttgataacaagtatattttacaacatgttctttcccagcccggcagggaggcttggggtaaagaatgcggcgctggagagcctccggggtgtactgcttgcccaaggtcttaaaacgcacggtgcgcccattgcccggaaggatcagcgcggggtgtttgcggtcaaaccggaaggcatagccttgcttctccagcgtccgcaggaactgcttccatgtgagggaagcggcggcagccgcattgagatcctgctggatgggcgttttccatgtgggcgctccattctgctcggccagccactggacgtaggggcgggcaacctgttccgatttctccgtatggataacggataggccatgctttttgcacagttcatcggaaatctgccgtacctgtgtgacataggttctttcattgctgcggtatttcctgccgtttttcatggacacggaattccagacaatatggttgtggatgcatttggtgttgagatgggtgctgactaccgcctgaaactttccactcagcagcctatccgcaaattccagcccgatctggtgggccagttccggcgttacctctccggcagcaaagctctgcaccagatggaagccctgcacaccttcttccttgtgccacatttccttgacgcggcacatatcttcaaaagccgtttcacaggtgcagccgagggcggacgcgaacagatcctgctcggttttgtctttgttgagcgccttatcgatttccctctccagcgattcctcgttttccctgcgggagcatttcttctcgtcaagggtatagtcgatggcgttgtcgaggcggtggacggggataatgctggtgtaggcaatagcggttttctcctttcttgggcgcgggtagcttaggctgattcacgtcttggttatgtgcgcgaattgcatccaaccgcaggttggctaccagttctcctttacttcttcccaaacctgccgggccagcttcgtcatttcctcgatatcctgctggctggcctctccataggtattagcgaccttggcaagctggtttgcgttgttgcacaacccagccaccttgtggagcagatccgtatggtggtcgcagggccttgcccgcagttccgcacccatgatgagggtgcggaggaattcctcacggggcaggccgcttgttttcacctgcgcttccagatgggccagttcctttttgttgagatggagaggaatgatgtggtttcgttttctcatagcgaggctccttttaacgctccggctctttccgtttccgggttttcttctgctccggcactctggcagggtgttcgtaatggacgggaatatcctgcaggcgcagcctgtcgcaatccgatgcgaatgccgcataccgggcgtaggaatacccttccgcatctacaagaatgccctctttaccggtttcacccttaacgagtacgcaatgccagcaaaggctgcccggatcaaaccacatcttgtcgctgtaatcgaacaggaaaatctggtcatccttgaggccggtttcctgaaactgccggaactgctcatcgcatagaacgaccacctgttccacctgaaaactggtctgccgctccggcacaggccgcagtgggttctgcccattgaggtcgttaatatggctgggccggtgatagaatacagcgtgctcttgataggctttcggttcttccaaggcgatgcgttctaccggtactccccgcaggtcgacgctgcgataatccctgccatagccaaggtacagggtatcgcgcccttgggcgatcagcatattttctttttccccttcggcccgcaccatgaggcagcgaaacaggccgcccggatcggcgctcatgatttcccggttatccttgaggaaagggtattccggggagacatcctccgagagcttttcaaaatcctctttgctcagaatgatgaccttcgccacctcaaaaacgccggggacgtagcttacctcgttccggcgcaggctgtccagtgttttggcgtttgccgcgaacgcggcgtattgcttttctctcagtattttcacctctcatttcttgaacgaaatcagccggtgcggttctgcggggggttggggcgctccccaagatgcgtttggatatccaaacgctatgcttgcaaaaccagtcaccggctggcaaagaaaaaacgacctcgaatcagaggccgccattctcatccgcttccttgatcttggcaagaccgtcaagggtggtgcagataagattgcgtttttcagcggccccgatctcagcggacatactgtggctgatttcgctgccgcacaccaccagcatacggcatcgccccagcttctggcgggcgatgctgtggaaatccctcttttcgtcggcgttatccggctggaggtactgcgtttcactcagcttcgggcagatgggcacgtatccgagctcataaaccttgcggcagtagcgttttaataggcggggcgcggcttcttccgaagcgcaaatgtaggcgaatgctttttccatgatgattttcctctcctttatatatatctgataaaatggtagcggcaggctggttgtccatgtggacgtccagcctgccgtttggttttctgttggtcatccacgtggacaaccacagggttattcggtagtttcttccgcttcggtatgggcttccaaggcaaaacgcacccggtcggagcctaatttgtagtaggcgtcggtaacttccacgcccacggcttcatatccctccagcttggcggcgaggacggtggtccctgccccgcagaagggatcgaggatgcgcccgcccggtacgcagattttcaccaagtcccgcataagctgcaggggcttctctgtcacatgggtgcggttctgcggattggcgtagcggaatacccccggcaaacatcccacagggcggttcaccggcatggggccgttggagccccacaccacatattcgctctgctggcggaatcggcctttctgcgggcggctggtcatcttatcccacaccacgcatcctctccagatccatccggcccattgcaaagcgtcggtgatggaagggtactgccgccagtcgatgaacaggcagacaggcgctcccggcctgcaggctttccgggcgtcggacagccactctgccatccatcttgtccagcttcgctggtcccggttatccccgtcaaaatccggcagggcgttcttggggttcatgctgctgtacttctggttggtggtgcggtttttctccgagggcttccacccgcccgaagcgtagggcggatcggtgatgagggcgtcgaacacctgcggtttgaatgcccggatgatctgcagggtatcaccatgcaggatggtccagccatccccgccgctatgctccaaaggcaaaatggattcgtctacgacttgtgcgagctctttcgttttgttcagaggcatcatcctttccttgtttggttatcgctccctgtcggagcgttttttctgttgttccggcatagcaaagcctttcggcttctgcggctcacgaagccccatgagcggaccggtatattcgttggcatagattttcaaaggttctctgctgtggttttccagtttttctcccggcggcaattcatagaaaccggagatctccacatttcctaccacggttccgtagatgacggcgtcgttcttaatgtcaggagaactatggccggagccgggcaggattcttgcatccccttggatggtaaccatattggtgacggttcctgcggcaacgatggcgttgtctaaaacccatacattccgatccagccgggcgtccccggaaatgatagacgagccaagcgcccggcaggccccatgcagggtgctctgttcaatgacacgggagttttccccggcgagcgcgttatcgtagatccagcagcttccttcctgactgagattccgttcgctttctacaaagccgccaaggtcgccttgatgaacatcttcccgaacgtcctgtaacgcccggatgcggtgcagccatgggtattgcgggtgagcgatatcggtaatctcatacttctgatctgattggcttttcctgtctgcgttttgtgacctctgatcctgatagtgctgtaaaagtttctgcatcatttcgccgacattgtactttttcgcaaaaaagcggtttatttcctcgatttccctcgaatgtaacggaggcgcttcaatcccaagcccaagacctatttcgccgttgtcattctgaagaagggcgatcttgattccaacgactttttcctgtaaagagggattgtcaaacccctcgaagaattcttccttgttcaaaatcagcggttcgctgtgtttcaatctgtcacaccccctttctatcgttcttctccacggccctttttcgctttcttcgggcttttctccggcagatcgatttccacgtattggctgatgacaccggatgataggttgtaaaatgtatggaactgctccatcatctgtttcgcccgttccggctgcccattttctatcagcaggcgttcagcccttttgaggacggagaggatatccccatcccatttttccagcttcatcttggggcgtttagggacaggctgctctatttccacggagaaatgatcggtttcccaaaagtggacgctgattacgccgcctttaaccttgatttcctgctgttcaaaatcttctccccagccgctcgaaaactgatcccgcaggtgattctgcaaggctttcatttctgcttctgtgagaggttccttcagacaaaccgtggcgcaggccatgagctcgccgccccggatttccagcgaggggatggcgctcagtaccttttccttaacgccggggttccattcttttctaaagcagagcatgagattccccgcattatggctgttgcagctttccacagcgcgaaggatcgggccttcgtattcggctaaatcagcaccattcagcggcacgggaacgtcggctgtcccgttgttccagctatcgtcatccataaagtccccggcaagagggaaataaagtttacatataatgttgtttacgtcgatgttccaatctcctttctaacgggagcaggccgccctctggcgggcggtctgcttctcatatcgttcttttgccagatcggcgtaatcgcagccctctttttccggcaggttcttcaccatgcggtatttgccctgataggctttttccaagtgctcagccgcccaccgcccggcaaagtcgttgtttgtgcagatttcgatttcctcaatttccgggtgccgcttgagaaaggcgtccaatgcaagcggctttttgaaggaaaaagaacgtggctgttctccttcttttggggcgctgatcccgccaagggacaaccgccatttatccgcagttccttccaacgtcaagtgggcgagggtttcgatggctgcttcgtacacagccagccggttggtttttcccttgggcgggaggcaaaagcagtattgtttttcgctgccggacacctccgccttgaaaggctttcctttggtataggtgccccgcaggaaggcgtaacgggcagtaccggcttcatcctttcccacgaacacggcgttgtggtagtccgcgctttcatagagaatccccgcccggatgcaggcttcgatcaccttgcggctgatcccgcgctttaggaggtaagcgaacaccctgcggttgtttgcagctgccgggggcagggcgaattccttttcctgctccggctgggaagggggcgggatgtagcaggggttttcttcacagagggccagcaccgcgtccacaaacttcacaccttctaccttgacgagataatcgagggcggatctgccgcctgcgtcccggcttttccaatgccagaagctggtttcttcattgatcttgaagctgtcgtgttcccggagttcaaactccccccggctgtcggttttgaccagttctccgggccggtaccgccgcaaaaactcaatggcggtcatccgtctggcggcgatgatttgttcttccgttactccgggcatagggctgctcctttctggttaaatgacagccgcccgcaggattttcgcctgatcggtgcgttcccacggaaattcaggcttgccgaaatgcccataggcggctgtctgtgtatatcttggcgttaaaaggtcaagctgggcgatgatctccgcaggtgttaagccgaacacgaagcgcgccgcctctgccagacaatcgtcggcacaaaccataccggtgccgaaggtatccacctccaccatgaccggctcggctttcccgatggcataggccagcgtgacttggcacttttcgcacaagcccgccgccacaaggtttttggcgatgtaccgggccatgtacgccccggaacggtccactttggtgggatctttgccggaaaaagcgccgccgccgtgcggggcgaacacgccgtagctgtccaccatgagctttcgcccggtgaggccggtatcggcttccgggccgcccagcacaaaccgcccggaagggttcagaaggattttcgtatcctcgtccgggggtaaagcctgcagcgccggggccagcaccttatcggtgagttcccagcagagttcgtctacgggcttattcgggctgtgctgggccgaaaggacgatggcgtccagccgcaggggggttccattctcgccgtattccacggtgacctgtgctttcccgtccgggcgcaggccccgcaccaccccggttttccgggcggcagcgagggcgctggtgaggcggtgggccagcataaccggcagaggcatcctttgcggggtttccgaacaggcgtaccccaccatcaccccttgatccccggcccccagctgcagggcgggctgatcttccgagggatttctacggcgctctaacgaacagtccacccctgcggcgatatccgggctttgccggtggagcaggcattggacggaaaaacgggcgggatcatatcccgcctttctaaaaaccgaatgcacaatggaagggatatccggctcaaacaggctggtgatctccccggcgacgataacctgccccttggtggccagcacctcgcaggccacacgggaaagtgcgtcatgggcgaggcattcgtccagcacgctgtccgcgatgatgtcgcacagcttatccggatgcccttccgtcacagattcggcggtataaaattgattcattttctcatttcacctccaaggaaaaaggcttgaggcttttcccgatttcctcgtaattgttaaagcgcacctcgcagcccaacaggtacgatacggcttcttcccattcctttaaggggtacttttctttgttttccatgcggtacaaatcgccaagggacgcccacttgagttccggtagcaggcgcaggttggagataaaggtgcggtgctgctcggctaaaaggtctaacaatccggttttcttcaatcaatccctccgatgcaataaaaaatatggacgggtgccctgtggcccccgcccggttaaacgcttccgctatttcttccttcggttgcggatgtgcaggaaaacaaggccgcctaaaatgacagcgcataagacaatcaaaataatggcttttggttccataggtcgattctcacctcacttctgtggcgacgactaccgtgcgggcgctttcccactcataggaacaggtgacgagcgtcagcaggcggcggtccgcgccgggtatggtttcggttttgcagagcgactgtgcgaagagctccttctgaaaagacaggaaatccgcatcgtccgcaaattcggtgcggttaaaggagagctttgtgatatcggttttcagcacagccgcaatgcggtattcccacagcccgtcgctggtctgcaggaggattttggaatgctcggttcggaaagcttcgtccgccatcttttgtagaacagcgaacatggtcccgtcgctcatgttgtgcccgtagactacaaggttccggctttccggggaacagtcccactgaaagaaaatgcttccggcagtacgatgctcgcccttgtaggtgcgccgcaaatagtattcaggttcatcggcgctgctctgcagaacagggtaatccacacaggtgccggggatggaaatccagcccttgatatccgggtattcggcctgcagggcggagaggtttacaagggaggctgcctgttctttcccagccggtaactccccggagggttctccggggaggggctgtgcgtattcttccttaagggcctgtgcttctctattggtcagccccggctggagcaccagaaaccagagaagccccaaaaggctcagggacaaaagaccgatgcaaaacccttttaaaaaggttttcattcttctgtgccctgatcctcatcgctgccaccggcagctttccgcttctttccggtatggcgcaggaagagcaaagcgccgccggacagggccgcaaacaggacaagcgcgccgagcagggcgggcatccacgggctatcgccggtctgcggaacggtaggcacttccggtaccagcttgttgtgcatcttgacggttgtggtttctcccgccttgatttctacggtctggtcatcgggcaggatgtatttctcggaatcctcgccagctacttcggatacggtgtattcgcccacacgaagctcgacgttgatttcgccgttctcatcggtctggaattcctgctcataggggttgcccataaagtcggtaccggtgattttgaaggtgcggccctcgatgttgtcatcgtcggctgtctttaccaccttcagggagccggtctgcgctttgttgaggaagcccacgccagcttcggtttcgatccgcacaacggccccgttttccgtgatggagaaggggtaataattctcgtcacgctggaaaaattccgggctttccttctcatgcaggaaatagtttccgtacacgaggtccttcatctggtagaggcccagttcggtttcggtcatttcgcccaccagatggtcgatatccgcatcgaattcgccgttgttgtccacatcggcgtaaatctcaaagacagccccggacagcttgttttccgggaagtcggcgtccaccttggtggtttcggcaatgcccttgatgatctggttttcgatacggatttcaatggtctgcccgtcctcggtgatctccaccgggaaggtttcttccgtcaatacgaaggccgccggaggcgcgatttcccgcaccagccaatttccaaccggtaccttgtcaaattcaaagtacccgatctcattgctttcggtaaccatgagtgcggtttcctcggtgaatttggtttcgtcgaaacggaacaggccgattttagcgcctgccagttcaaagccatcctgatccaccttccagccggatattttgccgcgctttaaggtgttttcaatggcttctccatcgttgaccttgatttccactttcgccacatcctgaccggcgtactcaaacaccaccgggtatttctcgccgcttaaaatgtagtgctcgtcggcgccgatttcctttacatacagggaagccccgcatggtacgtccgttttaaagatggcattgccgttttcatcgacgccaatcgtttcgatcagcccgtctgccgggatggaggttccatcggcggcagtcagttcctctgcggcgaacaggccgaaggtgatgtttttccattcctcgttcatgccgatggagaaggtttcgtcctgctccagcagcttctggagagaaatttctaccttctggcgctcgttgacaaaaccaacgcttgcggaggtaatctccacttcctgcccggcataggacagggtaacctctttgggttctggatcaattaccatgccatccggcgcggttcgctccaaaatctgatagcggcccagatacaagggttccgaggtggcggtcccgtcgctccctgtggtgagggtagcggccagttcaccggctttcaggtggacggtgccatccggggtgacgatatcttccagcgcggtgatatcgtaaacagcgcccggctggccctgcacctcgtattgaggctggtacagcccgcctgcttctgccacgtggctgaatacttcgccctctttggaaacggtgatggtgcctttctgcgcgatattgtatttctcaaccgtgacaacgtcctgcgttccgtccaccacaaagggaaccggctccccgtcaaacacatatccccacgggctctgctgttccaccagttcgtaatttccaaagcccaggggttccggcagcatgagggtgcctgtggcgtctgtcacgaaggtgtcgatgtcgatggggctggggtaattgatatgctgcaccacccattcgccggtatcggtattgcggattttgacagcagttcccgcaagaggaataatttttccactttccagatcctttttctcaaaccggatgagggaggtaaaggtagggttattgaggatataatagtaggtcttgccatgctcggaaatgaacacggagaagtcggggacaaatttctgcccctcggcccctgcggtttgatgcaccacgtacagaccgtatgggaggtccttcgaacgggcaaaaccataggaatcggtgattaaaaggtcacgctcggtttctttggcgttctcatagcttccggcgctggcaaggtaaacctgaaactccgcgccttcctccggctgctcgatctgcacttcatcgccggaggctgtggtggacaagggaagaacagaagctttggaggcaaggctggcaaccgcagggacaagctgcggcacagtcgatgcgcttggggcaggctccggctcgctttccggcgcggggctgctttcagaggacggttccccagcaggctctgccggggcttcggattccgcaatttcttccggctggctggaggaagcagcttcatcctccggcacagggggggattccgggatttccgaagaaccggagtcgggcgcttcctcgatagaattgctttctgccggttcttcttcagcagggacgctctctgcgggattgctttcctcagcaggcgcttccgactgcggggccggttcttcctgatcggggatggcaggctgatccgtatgcttggtgatggcgatgctgccgagaatgacgtcctctgtggcagtcatagggatgctgttgttctccaaggtgaaattgcccggttccgcgcctaccgggtagatggtttcgtccagcaggtacccttcgctgggggaaatttcacggatgctgtaatccgggccgcaggggtattccttggtggtgaatttgcccccgttcgccgtggtgtaggtatccagcagggtttcgcctttaaacatcccgtacacagcgccatccaaggtggaatcgccctgcgcttcgtcggtagcggagtccactttctccatctccacggtgaatttcttcaggatattggaaaagctgacgctggaggtctggccggggtagacggtcacctgctgagactggggctggacgtatttgtctggggcattttcggttacggtgtaatttccagcttggaggttatccaccttgatggtcccatccggtccagtcaccacgtccttctcaatcccgttgccggagatgtggaaagaaatgccggaaacctctccgtcctcagaggttttcacaagctgcagggcacccgccttgatttcaagggaaaaatagcatttcaccggctcggcggagccttccacatcgaaggtgaccacgttctggtattcgtcccgcagccagtatttcgtgccgcctgtaaccacgccgggaacagaggaaggcagccgcttttcggcggtaatggttccgaattcggtttcggaggtggagacgtgcagttcattgccgctgacggaaaaatccacgcccggatagctgacagcgaaatttcccagtacattgttctcatccaccagtgtggtttcgtttttcccattgctctcgttgtatttgagatcatgggtatatgccccaaccgcgcttggatcgtcggtggcaaaggacgggatggtgtggtaattcacgacgttctcccgaagctgatagaagatgggcttcgcggcggggctgttgacggtaaattcattgacgatctgcgtttcgtacccggtccccaattgctcgtgggcaatcagccagatgaggatttgggtggcgatgtactcgtcgatggcgctgccgccgtacttggtgccggtttccacgttgtaccccaaggtcagggcggtgttgatcatggatttctgctcggcggtaaaagcggcgtaatcgtccgactggtcataaccgatacccgtgtgtacgcctacgcccaactggatacagtaggcggtgcggaaggctttcaggtcgttgatccgcagctcggtgaacttattggaactgtagccgccaaacggggcgggaagattggaactgagggaataccctctggtgttatggtcgatcatggagatgtacccgtcgtaatcgtaggaggcggcaaaggcgctgcttggcataacgccaatacagagcagtaccgccatcatcagggacagcagccgttttagatgttttttcatgcgattctccttattcgtaaaatgcaaaaaggcccccgcagggtggagaattttctctccatcccacgggggccggtgttcagattatcgttcttcgccgcttttccggcggtggtgttttttctgcggaacaactttcttcggcagttccttctgagtgaaccggactgcttccaaaacaggggcggtttcgatcccgttctgcctgcagccgttcaggattccttccagataggctttggagggcatggcgggggtatccttgtacgggctgttcatggtgtaggccatgatttcatgcctgatcccatcttgatccgttaccactaccggctcctttccatatagataaggaaagccctcgtaatggtccagatgccgttcatcccgttcggagatccgccagaggacaccgtccacacagcttccttcttccggcaggatagtggcgacgccattcccgccgccgttcatgcaaaaggcgaggcggtacccttccagccggacggtatccaccacttccgcatcggggcagcggaacgccatctggtttaggttcatattagaaccataggcaaagtaaagtttttcttcggtattcatcacctccagtgttatcgttcttggtttcggcggttctgcaggctggggtattgggctttgtcataccgccatgcccggtcgccggggaggttcgagagcagatgctcccgcacatttttgtattccggcccgatgaggcccagccgtaaaaggaaggtgcggaaggtaaaggcggggttttcgctgatctcggtttttcgcatcaccgtccggctctggttgatggcctgcgcggagatagccagcgccagcgtgatatttgccctgacttttcctgcatggagagtgctttcaaaacagcgccattccaaggtgccgcgatagaacaccgaatgcaggttcagggcgtaatatctcgtccagttgtaatgttcgtagctttcatcccgcccgccgtaccattcccgcttgaggcgttccatggtggtattggtgggaagcttgcggattttttccagcatgggttcccgcaccttctggcaccagcgttccacccggtgttcattgacattgagggctttgaacaggatgtcctctttggaatacatgatggagagggcgtttttcaggctctgcggggtatgcttggaggcgtccacatggacgtgcatcccacagcttccgttcacgacagcccctgcatggcgcagggcgcggacaacctcctgcagctttcccatttcgctgtattccagcttgggagagttcatctccaccttataggtgccatcgcttatgggaagctgctgccgcccgatccgatgagaagcatggatgctggagtcgtagacaaaccgccatttcttgccctcgttgtctataacctcccacggatcgtaggtgcgggattcgtgcgtttgacgggccatggtgccgaacaaggctgccactgcttccgccgcctgctggcgggttatccccgtcatctcaatttcgcagccgaagtattggtcttttaaatcaatcgatggcgctcacctcccggtgggtagcggcaagccgtttcccgatggcttccaccactgtaacggtcacgccgtttccggcctgcttgtatagctgggcgtcggattggaggggcaaaacaatatcaatccgttcatctgcccagccctgcagccgcaggcattcccttggcgtcaaacggcggatgcgcttaaggggttccaaggtgccttggtcgctgctggcggtgagggtatgtgcgatttttcgtccaaccctgccgcgccgggtatttttctgagcaaacgccagattgatgctgtcgccgggataggccattttgtaccccttttttgtgttttccttgatgggcaggcccacctcgtacaaaccggttttcccgccgaagccgcccgtctgcgccgcgagggtgcagcttaccccttccggggagtagactcgctctccctgcgcgccggggcggatttgcataagagacgttcctgctgtttcggtgaaaggaagtatttttcctctgcatctttcatcaagatatccgacaaggtacaccctttttcgggattgggggactccgaaatctttgctgttaagcacttgccattccagaccataccccaatccgtccagcgcatggaggatagctgcaaacgtcctgcctccgtcatggttaagcaggccgggaacattttcaagcagcagatacgcaggtctttttgccgcagtcagccgggcaatttcaaagaacagggtacctcttggatcgtcgaatcctccacggtgtccagcaatcgaaaaagactggcagggaaatccgccgcacagcaggtcgaagtcggggatgccgtttggagcggcttttcggatatcttcacaaaaccactctccttttgtatcgaacagggcttcatagctttggtttgcctttttgtcgatctcgcaatggcctatgcaggtaaaccctccggcgcgggcgagcccttcccggaacccgccgatgccggagaacaggtcaatatatcgtatggttttctatatcacgctccttttgagggatttgatgaatcgttaaagcacaatcaatggacatcgcccctttttcgtgaactgaaatctatatgaaaacacccccgcaggcggctgaggcggtacctcagtcctgtgggggtgttgttggtaaggttattcttcggtttcttcatcttcaggggattcgtcggcaggctcggcttcttcttcctcgtcatcgtcctgctcccagccttccggtccctcattttcggcaggggcctctaaatcgtcgctgtcatcgtcccagccctccggttcctcgtaatcgggcacttcctcgtcggtttcggggccttctgcggcttcccagccgctttctgcctgttcctcctgttcggctgctctggctgcttcgaattcttcctcggcttcttccagcgcctgctcgatcagcccgatgacgaattccttttgggtaaggcggcggtggtagtttttctcgtagttttcaaggtattcctttaccctctggaacaattcctcgctcacctgaaatgctaatgttcttcctttttccatgactttgacagcccctttctcatagtgctccataatgaccatttcgatgaatttgctgattgtgctttctgtttccctgatttcctcgctgatgcgattgtgcaggtctaatgggattttgcaggtgatgcccttggtttccatgccctatcgctcctttttcgtttctttccctttcgggcaacacaagcatactgcaactcgcccgataaagctattaccaagagcaacaacctttcagccaaagcagggctgacaaacgtcacaaccaacaagggctatgtttggggctttcagcggcttggctcatccattttcttttgctttttgggggtaaccggctgcatatcctcaaagaaatatccggccatctgcttcatccagttaaaatcctgttcttccggtattgcaaccgtcaggacaacggcgtctgagatgcggctttttccgttttcccgatagtattcctcaaagctgccccaccagccatccgcgccggtcctgattatatcgtcgcgcccgtcaatgctgaggtaatagcgggcggtatccacgccgatggatttgccatctattttttggaaggcgtagatcttctcatcggcatagacgtctatggtctgccttggggcaaggtaaagcgtcatcgtccggtctgtgtattcggggtatttctcattcggcttctccagcaggacaagccgggccgcgtcgaaggatttgggcggtttgtaatccacggtgaggcgtttgagctcggcccctttgaaatcctcgaaatacaggggatcgccaaacacaatatgcttggggtttttgattttgtaaatttcttttctcataaatcggttcctttcgttttaaacagagttaatcttcgcccagcagggaaccgaggaagcccatcatctcctgcgggatggcttcctccggctgcttcacaggctgggaagggacagcttgcagttcttcccgcagcacccgccgcagggtagtttcaaaggtttccttttcttcgctctccagaatcgcctgcaccagaaaggcgtttttctgcccgtccggcacagcctgcaggatttcccaagccctgcggtggcgttcattctggagattggggcggaagccgaataggggcctgttcatcccttgctcacaccgcccgacaaatgccccaaaatccgctcgaatccttcggcgttcacacggtcgtctatcagggcaaaagcccggcacaggccgtcctgttcgctcacgttgcctttaaccaccgccgcgcccccgcccagcatgattaccgggatggctttcaggtcaaaccccgattccatggctgacgagagaagccgttcggtgtagaggcggccctgcttttggatgatgcttcgggcttcctcgtccatactgcaggcttttccggccagcacgcgctctacttgggcgtcggtaacggacatcccaatgtcgcggcggatctgttcttttgtttcgtcgatgcaccggatcatgccgagctccaagctgcggcaggtcgaagcgttgggaacgccgttgtccagccgcatgagatccaccgtccagccgccgatatccatgagcagaacagaaggttcgttttggatgagttcaggatggatggcgatggcggaatacccctgtgggaacagtttcacatcctcgatagttactttgtagggaattccctcaaatttgaagcacaccggctgggaagaacgcagaaggtattcccggaagggctttttctcacggccaaatccggccagaggcagccctgctgcgaggtttacggaacactcagccttttctccgcgctgtttaatctctttggcgatagcggcaagggtaagcaggtagtagttgtcgttctccatcttgttccgcaggatgggctgcctgcccgtcccgcacacgaaaaacttcccgccgtactccagcgtgttctgcagggtgtagggttcatggctgtaaacagcgataccggctgggaaagaaaaatgccgggttttgatggcgtaatagccgtggtctatgccgatgttcatggttttgctcatcctttcttgacggttgttgaaaacttgagggctttgtttgggggcttagagtatgcttgctggaaagaaatgcttgttctttcccagctggtaagtaattagggggtgagggtgtgggagagggggaaagcgaaaaatcgctgcgaaaaacctccccggcggcctgccggagaggttctaaaaaagggcgcactacccccttgtatcttgagggcttaaaattggcccgttttagggattcgtcaatctatctatgaaactgccggaaacttctgcatttccgacaacgggaaaaaagggtggtaaacgcaaaaaagcggggcctccggcctgaataatcaggcggaagccccgcatctgctcacgaaaaatcttgatattgccattttatggaaaaggcatctatggaaaatcattttggattttgcgctctaaaaagcccgcaaacccgcatgaatactgacaaaaatggggtaggcatctaaagtgtctaccccagatggtggaggagggtggattcgaaccaccgaagcgagacgcaacagatttacagtctgccccctttggccactcgggaactcctccatatttaaatgtatgtgccagcacctctggatcacacgccgtcttggcacgattggtattatactgcacatcgggaaaaatgtcaatataaaaattgaaaaaacgtgaaagaaaaagcagatgggagaagaacgcccatctgcatcgcttcgcttcttcagttttccgtaacctgtacggttgtgctccataccggcctgccgctttcctcaagccacaggcgcacggcgccgggctcggcatcaaactgcatccgccggttccagacgccgagggcttccagcccgagccgcagctcgatttcacgcgctttgcccggtgcaaggcacaccttttcaaacgccttgagctccttgacgcgccgcacgacgctgccggaaagcccctcgatatagagctgcaccgtcgcccacgcaggccgatcgcctgtattgcgcgccgtgcagcgcaccgaaagcgtttcgcccgcccgcagcgccgccgccgagatcgtaccgccgcagcacacgttttccaccgcgggcgccgcataatgcaggccaaagccgaacgggtagagcggcgcattcggcaggtcgcggtagcgcatcgggtcgtaggatgcgcgcgcgttgtagtataccgggagctgccccgtcgcgcgcggtatggataccggcagacagcctgagggttccgccgcgccggttagcacctcggcgacagcctgcccgccccacgggccggggtaaaacgcccagagcagtgcgctgcttttttccgcgacagcctgcaccgcatgcggccggccggagattatgacggtcacgaccggcttgcccgctgcgaaaaccgcctcggccagcgctgcctgcgcgccgggcagcgcgaggtcggacgtatcgacgccctcgccgcagtccatttgcaggccggcgccggcgatcgcagcgccgttcgtgtcaaaggccgcctcgcctgcaaaccggctggaggagccgccgagcacgagcacgacgaggtcgctttccgccgcaagccgcgccgcctccgcgatgcccgccgtttcaccgccgcagaccgtacagcccgccgcaaagcgcaccgcactgttctgcagcgcggcccgaagcccggcgagcaccgtgacgcccgttcccgcgcgctgcggcggtgtataatcgccgagctgctggtagattacatccgcatttggcccgatgacggcgacgcggtgccgcgccttcgcgtcgagcggcaggatgccgtcatttttgagcagcacggcggactgccgcgcaagctccaagctctgcggatattctgccgcggtgaacggcgtcagcggcttttcctcgagatacgggtgctcgaacaggccgcgcgcaaatttcatctcgagcacgcggcgcaccgcgcggtcgagcaccgcctccgcgacaagcccgcgctccacggcctcctccagatgcgtgaaaccatcgtcccacaggctcacatcgacgccggcagaaagcgcatacgcgccgttggccgcggcgtcgccgtctgtcagcacgccgagccggtcgatcgcgcagccgtccgccatgacgatgccgtcaaagcccatctcgccgcgcagcacatcctgcaaaagccatgcgtttgcgtggcacggcacgccgtcgatctcgttgtacgccgccatcacgccctttgcgccggcccttgccgcggcggccatcggcggcaggtgaatctcccgaagctcgcgctcgccgattctcgcggcgctcgcgttgacgccgccggtcgtctcgccctgcgcgcagaagtgcttcgagagcgcctccacgccgccggaaacacagcccctgaccgccgcctccgcgttttttgcgcagaggtatgggtcctcgccgtagcattcctcgctgcgcccccagcgcgggtcgcgcagcacatcgagcatcgagatcagtgcaagatccacgcccatttctttgagctgcctgccgaccacgccgaaagccgattcgacgagcgccgggttccacgccgcgcccatcgcgaggttgaccggcagcaggtagccgtccagcgcctgatgcccgtgcgggcactcctcgctcagcagcatcgggatgccgaagcgcgaatgctcgacgacgtaccgctgcgcgaggttgtaggcgcggaccgccgcgcgccccgtgaggcccgtttcaaagtccttgtccgcccacgggtccgcgcggtacaggccgtacagcacgccgagcccaccccagcgctcggcctcccttttgaaatcctccgccagctcgaccgcatcgccggcccgcacatagctgcgaaagccgtacagccgctggttgacctgcccgaccttttcgcgcagcgtcagcctgccgagcaggtcctcggcgcgctccgccggtgaaagcgcgctgttgcgaaatttttcatctgccatatcgatcacaactccgtctctttttattctctgtgtccgccgtctcgatctcaaagccgtattcccgcagcgtcagcgcggcgtcgattacctcttcgtgaacgcccgccgcgcgcgtaaagcccgcgcgctcgtagaagcggatcgccggccggttgaccggcatcacgaacaagcgcaggtactgcgcgccccgcgcccgcgcgatgcgccgggcctcgcggatcgccgaaagccccacgccgcgcccctgataatcggggtggacggcaaagcgcccgaggccgaccgcacgcgccgcaggcgcacgccactgcacgtcatccgcaccctcaagcgcgaacagtgcaaaggcggcggcgaccgccccgccgtcgtcgagtatatacaggctcccgcgcgcaatgtcccccggaaaagccatagctggataggaatcgtcccagattggaacgccgtcccggttcatcctttcgataatcgccgcaaacgccgccctgatctgcggcagatcttccggttttgccgtgcgccactgcatgaaatccctcccttttgcatcagcatagcacaattccgccgcggaagcaatcgaaaaccatttcttttccgcgggttttgtggtatactgaaaaacaatactacgaaaaagttgggaaagcaatatggatagaagcagatttctccccgtttccaaagcggatatggcggcccgcggcatcgagcagctcgatttcgtctacatcagcggcgacgcctacgtcgatcacccgtccttcggcacggcaatcattgcccgtgtgctcgaggccagcggcttctcggtcggcatcattgcccagccggactggcgcgaccctgcgagcatctcggcgctcggcgagccgcggcttgggtttctcgtctctgccggcaacatggattcgatggtcaaccactattccgtctccaaaaagcgccgccgcacggacgccttctcgccgggcggaaaaatggggctgcgccccgattacgccgcggtcgtctacgccaacctgattcgccgcacctacaagaaaacgccggttatcctcggcggcatcgaggcgagcctgcgccgcctcgcgcactacgactactggtcggaccgcatgaagcgctccgttcttctcgactccggcgccgatctgatctcctacggcatgggcgagcgttcgatcgtcgagatcgccgaggcgctgcgcagcggcatcccggtgcgggacatcacatttgtgcgcggaaccgtgtataagaccgccgttcagcccgacttgccggacgccatccgcctgccgggcttcgacaaaattgcgacgagcaaggagctgtacgcgaagagcttttaccggcaatatctcaacaccgacccattcacggcgaaaacgcttgtcgagccgtatccggcggacaatctctttctcgtgcagaacccgccgcagaagccgctttccaccgaggagatggacgcggtctacgcgctgccgtatgcccgcgcctaccacccggattacgaggccgccggcggtatcccggccatcgaggagatcaagttcagccttgcaagctgccgcggctgcttcggcgcgtgcagcttctgcgcgctgaccttccatcaggggcgcatcattcaaacgcgcagccacgaatcgctgctcgaggaggcgcggcagatcacgcaggcgccggatttcaaaggctacatccacgacgtcggcggcccgacggcgaatttccgccagccggcctgcaagaaacagttacagcacggggcctgccaaaagcgccagtgccttttcccggagccgtgcccgaacctcgagatcgaccacagcgattacgtcgccctgctgcgaaagctgcgcgcactgccgaaggtcaagcgcgtgttcgtgcgctccggcattcggttcgattacctgatcaacgacaaagatgagacgtttttccgcgagctcgtccggtaccacgtgagcgggcagctcaaggtggcgcccgagcacgtctccgacggcgttctgcgcatgatgggcaagccacagaacagcgtgtaccgccgctttgccaagcggtataaagagctgaacgccgaaatgcacctcgaccagtacctcgtgccgtatctgatgtcctcgcatcccggctccacgttgcaggacgccatccggcttgcagaatacctgcgcgagctgggctacatgcccgagcaggtgcaggatttctacccaacgccctcgacgatctcgacctgcatgtattacaccgggcttgacccgcgcacgatgaagccggtctatgttgcgcgcgatccgcacgaaaaggcgatgcagcgcgcgctgatccagtaccgcgacccgaaaaactacgagctcgtgaccgaggcgctgatcctcgccaaccgccgcgacctcgtcggcaccggcccgaaatgcctgctgcgcccccgccacggcgatacgcgctttctgcaaaaaacacccgccgcgcagaagcatgcggaaaagcggcggagcgtccccgtcagccgccgctgggaggagccggcgtccggccgcggcgcaaagggaaaaaagagaagataagcgcagatttgcagcgtccgccgcagccgaggcgggcgctgcaagcctatgcgcgcgcgtcatttccagcgcgcaaaaaagaattcacttttttgaaaaaagggcttgcatttatcgcacgcatggtgtataataacaaagcactcgaaaagtgaatatatcgcggggtggagcagttcggtagctcgtcgggctcataacccgaaggtcgtaggttcaaatcctgcccccgcaaccaaagaattccggatacctttcatgggtatccggatttttgttgaaataaatcaaaacctcggatcaagagtttttttgcgcgcaggcaataccatccaatatcctcaaaccgctgctcctgaaaatagggcagaggctttattatctgctcttggtacccaagttcccccaatgtgtcttgaaccagctcgacggaaaagggcgtcagatgctcttcaaaaattgtctgccggataatttttccctccgactcgtgtgcgtgaaggatgttgatggttatggtgccgtcagaatgataatcccaaagctgtacgtaatggattcgcacgccgtctggccgaatgaatggggaggaaaagaagaaccggtcctgccttttcatcgccgcatcccaatttcgggaatccagatacagatacccgccgggacggatcaggcggtccatttcgcgcagggtttgaacgacaccggcgtggtctacatgggccagcgcgtttccggtgctcattacacagctgaaatcccggtcaaagtgtttggataattctctgaaatcacagcaggtcaagtccacggtaaagcccttctgcgccgcttttgtgagcatactccgacttaaatctgagccggaaacctgatagccaagttcacacagttcgaaggtcagatcacctgtgccgaagctgcaatccaaaatatcgatgattttacagccggagaatatttttcgatagtgttcccgataggctgcgtttgccgcctctgaaaatcgctcgtcgtatatatccggaaaatcatagaggtctgccataaaaatatccccaatcccttgtattttcagccaataatatattttttccttggaaaaatcaagagacggatgttcgggagggagccatgaattgtagaagcgcagcttgatctttcttgaattgtacttttgtctactgcaacgccagactgctcgatttggcaggatggcagcatcggtttggtagggatagcagagaagcgaggattgaggcgctttcctattatcaaaatgacaacggcatttttagtcacgctttggagccggatgcttgaaatctgaattcaccgcctatacaaacttggctgcgcaaccgggattttgtgtgaaattgattttacagaccatgtgcatccgctcgagttcaatgctctgcaaacggaaagggctgaaaaattatggctccgcacgtgattttgagcgcgcgccggcgcttgactgagtatctgaaacggaacgcccgaacagcggcgggcgggagcctcctttgcggggaggggcgcaaggtcctgcaaagacaaagaatccgaacccatctccgattggaaataggttcggattcttttagtttggtatggatgttcataacgatactctgccaaataaaaaaatccgagtgtccatatgaacactcggattggtgcgcgagacgggacttgaacccgtacgtcataaacacacgcccctcaaacgtgcctgtctgccaattccagcactcgcgctcaacgtgatttattataccatattttctacatttgtcaatgtttttctttttgttccgcgaaaatctgcgtttgcatcgattcagccccgcctgccgcgtggacattccgccgccgccgtgctataatagattcaaaatctatcgcttgcaggtgcttttatgagagaaaaaacagacgctccgaaggagatccgcatccggggcgcgcgggtgcacaatttgaaaaatatcgatgtcgacgtgccgctgaacaaaatcgtcggcatcgccggggtatccggctccggcaaatcctcgctcgcgctcggcgtgctgtatgcggagggctcccggcgctatctggaggcgctctccacctacgcgcgccgccgcatgacgcaggccgcaaaggccgatgtggacgaggtgctgtacgttcccgctgcgctggcgctgcaccagcgccccggcgttccgggtatccgcagcaccttcggcacgggcaccgagctgttgaacagtctgcgcctgatgttttcgcggctcgcgagccaccgctgcccgaacgggcactatctcgccccaacgctggctgtggcggccggacgcgcgctgacctgccccgtatgcggcgtgcgcttcttcccgccgggcgctgaggcgctggccttcaacagtcagggcgcctgctccacctgcggcgggaccggcatcgtccgcaccgtagaccgcgccaccctcgtgcccgacgaatcgctctcgatcgatgagggcgccgtcgcgccgtggaacacgctgatgtggtcgctgatgaccgacgtctgccgggcgatgggtgtgcgcacggacgtcccgttcagcgcgctttccgaggatgaacgggccatcgtgttcgacggtccggccgtgaaaaagcacatcttctaccgcgccaagaattccgagcaggccggcgagctggatttcacctactacaatgccgtttacaccgtcgaaaacgcgctcgctaaggtgaaggatgaaaagggcatgaagcgcgtggagaagtttttgaagcaggacgtctgcccggactgcggcggtacacgcctttccgaggcggcgcgcgcgccgcggctctgcggtatcggactcgatgaggcgtgcaaaatgacgctttccgcgctgacccgctgggtcggcagcgtgccggagacgctgcccgtaccgatgcgcccgatggcggagagcatctgcgactcctttcgggcggccgcagcgcgcttatccgagctcgggctatcttacctcacgcttgaccgcgccgccgccacactttctaccggcgagcggcagcgcatgcagctcgcccgcgcggtgcgcaaccggacgaccggcgtgctctacgtgctggacgagccctcgatcggcctgcatcccgcaaatatcgccgggctgaacgcggtcatgcacgacctcatctccgatggaaattccgtcctgcttgtggaccacgacgcgcagatcctctcggaagcagactggatcatcgaaatgggtccgcaggccggcgcagagggtggccgcgttgtggcagagggcaccgtcgacgcgctcatccgaaacaaagcttcccagatcgggccgtttctttccggggcggcgccgaatttcgcacgcccgcgcggcggcgcactgtttgcggcgggggcgattcgcctttcgacagcggccatccacaccgtaaagccgctggaggtccgcattccgaaagggcggctcaccgccgtcaccggcgtatccggctccggcaaaaccacgctgatcctcgagagcctgattccgggcctcgcggccgcgctctccggcgcaccgctgcccgcgcatgtcctttcggtcgacgccgccggtatccggcaggtcaagctgatcgacgccacgccgatcggcatcaacgtccgctctacggttgccacctacgcgaacgtgcacgacgagctgcgcaagctttacgccaaaacgccggatgcaaagcagcgcggcctgaaagccggtgatttttcctacaacacgggccgcctgcgctgtccgtcgtgcgacggaacaggcgtgatcagtctcgacgtgcagtttctcccggacgtcgagatcccgtgcccggcatgccgcggctcccgctacgcccggacggcggaggagatccggtaccccggcgccgatggaagcctgcacacgctcccggagctgatgggcatggaggtcacggcggcctgcgccgcctgcacgggcctcaagctcgtgcaccagcgcctccgggtgctcgaatcgctcggcctcggctacctgacgctcggcgaggcgacacccagcctttccggcggcgaggcgcagcggctgaagctcgcgagcgagatgggccgcgcgcagtcggattcgatcttcatcttcgacgagccgaccatcggcctgcacccgctcgacgtgcagacgctgctcggcgtgtttcagtcgctgatcgaaaacggcgccacggtcgtcgtcatcgagcacgatctcgacgtgatccgcagcgccgattacatcattgacatggggccgggcggcggcgcggagggcgggcgcatcgtcgcggccggcaccccggcggaaattgcggcctgtgcggaaagcgcaaccggccggtatatttgaagcagcaaaatcgggcggacctccggctgaaaccagccgccggggtccgcccgctttctttgtgtttcactttgaaggacggctgctgtgcagaccggagccgatttccccgcatggaggtcgaaaagaaaccgaagggtgcaggtgaaaagggcagagggcgcgcagcccacgcgtttttcgcttttctgcggagcaaaaccgcgttatttaacgcacgcaaaaaggaacatttccgcttcatttgaggcggccggctgcttatcgtacgtcgaatacacttcgacttggctgaatccgagctcagcgaggatcttttccatttcgcccagctcgtacaggtggatctggaagtccatgggctcgctttgcagaagcgtatccccgtcgtacagctcgtaaacagagggggaatactgggtgtgcgtggcttcgtcatacgtgtttttgtatttcgcgatcaggtcgaagccctcctttgtcttgacggcgaggctgggcttgaagtcggcgtcatccgggcagcggcaggcgacggtgtccacggcgaacacaaaccggccgccgtctgttaaaagcacccgcattttgcgcaggatgcttttgcagacggccatatccgtgaacagccccacggagccggaggaaatgaagatgtagtcgaaccgctccggcgaatcgtatgcctcgatggaggagagtgtcaccttggcatggggcgccttttccttcagcttatccagcatctccttagagagatccatgccggtgatgtcgcagccgcgcgccatgaatgggatcaaaaaccgcccgctgccgcacagcggctccagcattttctggcctttctgcgcgtaggagagatagaactcgagctcgtcctcgggcgccgtttcatgcaggatttcgtacatttcggtgcacagactcccgtagtaattctttggaacagacataaatgaaaaatctcagctttctttgatgggaatatagatttcagcgatggcatttttcagcccgtggaagcacaaacaaaagcatggagatccgaaggatctccatgcacattttttatcggtcggacgggaagcggatgccgccgtcggcgcgcagctgctccatatacgccgaaacgtcgcaggccaatctgcggcaggcgtcgtattccgcggcggaggcctccggctccgtaatataccggtagaagtccttcgcctcatagcccatcagcttgtatttcggctcctcgccgcagacggtttcgcgcgtgccgtcgttgtagacgatctcgatgttcgcgagccgcgagatcgattcgaccgagacggtgccgcggtcgccctgaaaatcggtgttcgcgctagcctgcccgatcttcgagtagacgagattgacgagcctgtccggatactgcatcgcgacgatgccgctgccgtctgcgccggaggcgagcagccgcgcggtgatctgcgtgctttccggcaggccggaaaggtggagcgccgggtaaatgcagtagacgccgaggtccatcagcgcgccggtttcgagcgcagggttgaagatgttcggcaaattgcccgcaaggtaggcgtcatattttgaggagcgctggcagaaatcgatcttcgccattgtgacggggccgatcttttcgagcgccgactcgagcagcccgcgctgcggcaggtgcatgtacatgatggcctcgaggtagacgagcccgcgctccgccgcgagcgcctgcagcgcgcgcacctcgtcggcgtgcgcggcgagcggcttttcgcagatcacgtgcttgccgttttcgagaaagacgcgcgcgtgcgcggtgtgcagcttgttggggctcgcaatgtatacggcgtcgaccgcgtcgctctgggccatttccgccacatcggtgaaaaccgtatcgacgccgtacttcgcgccgaattcaaggcccttttcgcgcgtgcgcgagtaaacggccgtgagctgccagagcccgctgtcgagcgcgccctcaatgtagctgtctgtgatccagcttgtgccgactgtgccaaaacgcagcatagcttggctcctttccgatcattctacgatctcgacgatggttttcaggatttccacgatcttttccatgtcctcgagcacgacgagctcgtgcttgccgtgggcgttttcgccgccggtgcacaggttcgggcagggcaggcccatgaaggagagccgcgcgccgtcggtgccgccgcggatcgggatgatcttcggctccacgccgtttcgcagcatggcggccttcgccgtctcgatgatctccatgtgcggcaggattttttccttcatgttgtagtacgtgtccgtgagctctacggtgacgagtgtacggccgtacttgcggttcagaaaatccgcggcaaggcggaacttttccttgcgtttttcaaaaagcgtccggtcgtggtcgcggatgatgtagtcgagcaccgcgttctcaatctcaccctgcatgccgactaggtgcgcaaagccctcgtagccctcggtgttttccggcacctcgtgcttcggcaggagggcggcgaactccatcgcgacggtcatcgcgttgatcatcttgtttttggcactgccggggtggacgctgaggcccttgaccgcgacgtgcgccgaggcgccgttgaagttctcgtattcgagctcgccgaggtcgccgccgtccacggtgtaggcgaagtcgcagccgaagccctcgacgtcgaacttcacgggacccttgccgatctcctcgtccggcgtgaacgcgattttcacggtgccgtgcggcagattgttctgaagaacctcctccgccatttgcaggatctccgcgatgccggccttgtcgtcgccgccgagcagcgtcgtgccgtcggtgacaatcagcgtttttcccctgcggttttgaatcgccgggaaatcggaaacgctcgtgacgatgccgagcgtctcgttcagcacgatgtcgccgccgtcgtactgctcgatgatgcgcggcttcacgcccttgccgctgaaatccggcgcggtgtccatgtgcgcgataaagccgatcgtgttcttcttctcgcagtttgccgggatcgtgccgtacacatagccgtactcgtccatgaaagcgtcttgaattccgatgcgctgcatttcctcgacgaggtgcgcgccgagggttttctgcttttccgtggaggggatggtggcagaggtttcgtcggactgtgtgtcgaaacggatataatccaaaaacttttccttgacggacataatttaacagctcctgttcgatgatgtcgatgctttaactatactacaaaggcgcgccgtttgcaagaaaaagtcccgcgccttttgggcgcgggacgggatgctttcggcggaaaatcaaatttcagaccagtagcgcttgaggttcgcgaggccgatgcgcagcgcttcaaacacaggctccatgccctcgaactcgatggagatgtaatcgtcgtacccggctttcttgagctggtacatgcactgcttgaccggcacgttgccgtgaccaacgatcgtgccgcgaaggaagttgccgccgcgggtgcggaaggcgccctcgcccgggtcgcaggcatcgaagggcttaacgatgaagtccttcgcgtggacgtagatcgcgtacggcgcaacgcgcgcaaaggccatcgccgggttctcatcggcgcagaggaagttgcccatgtcgcagagcaggccaaagttcttgtggttgattgcggaatacagtttctccacgcgttcggaatcctgcgcgtagaagccgtggttctcgatcatcgtgcggatgccgaactgctcggcgtattcggtgacgaggcggcagccctcggcgaggcgggggagcagcgtgtcaaacgcgcagtatttgccggagttgaccgggtagccgaccgttgcgtcatggcgcatgcgcttgacgccgaggatgcggccgaggtcgacaaacttcttgacgcgctcgatctccttgtcgaaatcgccgtcgcagccgttgatgaaatcggcgccgatcgtgaggctcgagatctcgaggccgaggcggtccgcctccgcgcggatcttttcggcgtaggccgggcgctcctcctcgggcagcggcaggaaatcgacgaaatcgacgaactcgatcgcgtcgaagccgagctctttcgtcttggcgatgacctcgaacggcgtgatctcgccggcgcggatcattttcatgtagctgtaggaactgacagaatatttcatgttaaactcaacctttcccggtattaccggagtgttttagtcgccgaaggaaatgccgatctctcttgccgcgaggatctcctcgcagtccacgggcacagtcttgagcttgcccgcaacctcgctaagcggcacggggacgatctggccgttgacaaggccgaccatgttgccgtacttcttctcgcggatcagtttggccgcggccgcgccgaaacgcgtggaaagcacgcggtcgtaggcgcatggactgccgccgcgctggaagtggccgggcacgcagacgcggatctcgttgtcaacgcgggaggaaagctcctccgcgatgcggtagacgatcgagggatgcttcatgtcggcgcgcgccttcttgaagtcctttttcttcatggcggcttcctccttggagagcgcgccctccgctacggcgagaatcgagaatttctttcccttcgcaattctattattcaacgttttggctactttgtcaatatcatacgggatttccggcagcaaaattacatccgcgccgcccgcgatgcccgcgtaaagcggcagccagccgaccttatggcccatgatctccacgcagaagatgcggccatgcgaggtcgccgtcgtgtggatgcagtcgatcacgttcgtcgcgatctccacggagctgtggaaaccgaaggtcatgtcggtgccccagacgtcgttgtcgatcgttttcggcagcgagacgacgttgagcccctcctcgcgcagaagattggcggttttctgcgtgccgttgccgccgaggatcacgaggcagtccagaccgatctttttataggtgtctttcatgttcttgaccttgtcgacgctgttttcgtcgatgacgcgcatgagcttgaacggctggcgcgaggtgccgagaatcgtgccgccgagcgtgaggatgcccgaaaaatcctcgggcttcatcagcttgtattcgccgaaaatcaggcccttgtagccctccttgatgccgtagatctcgacgttgtcgccgaactcctcgtagagcgatttcgcgacgccgcggatcgaggcgttcaggccctggcagtcgccgccgctcgtgagaataccgatttttttcatgttccttcaacctttcttatgtttattcgtccgccgaatggatcggaattaaaacgctgtccttttcgatggcctgcagcgccttgaggcgctcctgcgcctcgcggtaaaaggcgagctgcgaattgatcttctgcttgccgcgcaggtcgacgtgcacgtagctcgtatcgctctgcatgtagcgcgcgttcgtcgtgtcgctgagcatcgtgtcgaggattgagaaggcgcgcgccttctgcttttcgtcctcgatcgggaaaacgagctcgacgcggcggtcgaggttgcgcggcatccagtccgcgctgcccatgtagatgcgcgggttacccgcgttttcaaagcggaagatgcggctgtgctcgagaagctgcccgacaatgctgacgaccgtgatgttctcgctgacgccttcgatgccggggatcaggcagcagatgccgcgcacgatcatcttgataggcacgccggcctgcgaggcctcgtagagcagctcgatcagctcgggatcgacgagcgaatttaccttgaccgtgatcccgctcgcgaggccctttttcgcgttctcgatctcctgctgcaccatgtacacgaagaagctgcgcatgccgtgcggcgcgacgatgaagtgctggtattcgggcggcctcgagtagccggtgatgacgttgaaaagggaggaggcgtctgagccgaacgactcgcggcaggtgaagaggccgagatcggtgtagatcttcgcggtggaatcgttgtagttgccggtgccaagatgcaggtagcggcggatgccgtcctcctcacggcgcacgacgagcgcgatcttgcagtgcgtcttgagaccggaaaggccgtagataacgtggcagccggccttttcgagcttgcgcgcccagttgatgttgttctcttcgtcgaaacgcgccttgagctcgacgagcaccgtgacctgcttgccgttttccgcggctttgatcagcgaggcgatgatcggcgagttgccgctgacgcggtacagcgtctgcttgatggcaaggacgttttcgtcctccgcggcctgcgcgatgaactgcacgacacagtcgaacgtctcgtaagggtggtgcacgaggcggtcgccctcgcggatggcctcgaaaatatcggtgcagccccagaaatcgccggggggcgaggtggggcggatcggtgcgaagcagaaggcgtcacagccggaaatgcccgcgaatttcgagaagaaggtcagatcgatcggcccctgcagctcatagacctcattttcggcgatgccgagcgttttcacgaggaattttttcgtgtcgctgtcggtgcgctgcaaaatttcaaggcgcacggggcggccgcgcttgcggcgcttgatcgatttctcgatctcgtacatgaaatcgtcggcctcctcgtcgatcgtgaggtcggaattgcgcgtgatgcggaacgggcagacggccttgatctcgtgcagctcgaaaagctcctcaagatagtaggtgatgatgtcctccaaaagtgcgaagcagcgtgttccgccgtttttcggcagctccgcaaagcgcggcaggatcgacggcacctgcacgacggcgaagcatttttcgcccttatcctccttggaggcgaggcgcacggcgaggttcaggctcttgttcgcgagcatcgggaacgggcggctgctgtccacggcgagcggcgtcagcacggggaagagcacgcggtggaaatattcgccgatgaacttgagctgctccgcgttcatcttatccggcggcagaaattcgatgtccgcctgctttttgagcgccggcagaatggagcggtacaggcaggaatactgcttttccatgaacgcgtgcgtctttttttcgagcgccgcgagcagctccttcggcgtcaggccggaatcgtcgggctttgtgtagccggagcgcacctgccccttcacgccggcgacgcgcaccatgaaaaactcgtcgaggttggagccggtaatggcgagaaagcgcaggcgctccatcaccgggttgtcttttttctgggcctcctcgagcacgcgggcgttgaaatccatccagctcagctcgcggttatagtaaaattttttcttttcggatgccattgggttcctttccttcctctcgtcagagcagattggagcggatgtgcagctccgggctgaggccgaacacttccttgaagaagccggcgcattcctcaaacgcccatttctcgagcagcgcgttgtccgacgcatccgccttgatttccagcttgtcgtcggtgatcttgaccttattgagccgcagcttctgccgctttgatttgtcgagcgcgtttgcgagccggaagatcgcgacgagctttgcgatctcgagccgctttttttcggagatgttgtagtaattgtagtcggaggtgctcggcacggcaaattcgttgtagccggagacgaacgccgtcagcaggagctggccgcgcgtcaggccgaagatgtcgaaattgcggatcaggtcgaacgagcactgcgtgtgcgtgcgcacgttgatgtactgcccgcagctgtgcaggattgaggcgagttctaaaatgagctttttatcttccgaaaggccgtgcaccttcttcagcttgtcgaaaagcgccgatgcaaagccggagaccgccgcggcgtgcgtgccgtggcagttgtattttgcggcgagccgccgcgcggagacgagcgcgctcgtctgtatctgcgcctcgtagtccttctccgcaccggggatgagcatgtgccgcgtgatcgcgtcgcagatatcgacgtccgggcagatgatctttgtctggtccctggagagccgcagcatgccggtgtagatggaaagcgccgtgtagagaatctccgcgcggtcctccgaaatgttatagcggcgggcgacggcggagtacgacatcgagcgtacctcgctgtaggccgcgcgcagctttttcgccgagatcgtgtagagcccgccgtttttctctgcgccgcaggcagaggcgacgagcgcgaggtcggagccggtcagcacaatgctgcggatctcctgatcggagatgtccacgcggttgaaaacgatgtcaaggtactcctcgatcaccgggtaaaacgcattgctttcctcgttcagcgtgctcagtgtatcgtgcagcttcagcgagccgatcgggatattctgcgaaacactgatcgtgccgccgtcatacagcgcgatgccgatgctgccggtgccgatgtaggcgatcatcgcatcctttatatccagcttgttctgcagctttaaaagccggatgatctccgagcagatcagcgccttttccgtgctgtattcgagaatttcgagattcatgttgttgtggattttgagctgatcggcgacaaacgcgcggttttccgcctcgcgcatgaccgtggaggagacgacgcgcacgtttttgcagccgtagtccgcgagcgcggcggtaaatttcgacaggatcgaggagagctggcgcaggctttcaaagctgacgcgcccctcgttgaacacctcgtgtccgagataaacgggatattccagcgcgtccagcgtttcgatttcgccgcggcggagctgggaaacgcgcatgcgcacggcgctggagccgatctcgatgacagccgcagggcctgccgtgctttttttattcaagtcagagcaccacctttcgatgtctttctatatattaatcattataccaagctttcggggaaaaagcactagggttttgtgtttttttacagaaaaattacaggcgaaggcggccgggaagaaagacgaaaaaaattgaatttaccccttgatttttttcggccgatgcgctataatatcaaagtcgccgtggagaggtattctaatggtaaggagccacattggaaatgtggtgtgccgcaaggcattgtgcgttcgagtcgcatcctctccgccaaagtccctgatgcagtctgcatcggggactttttctttttatgcaaatcttgatcggtgagcagaaggccatatccaaaggcgaagcgtggttccgccccagcggcgtgggttcagaacggctggtggggggctcggcggcgccgggggagggagcgcatataaaacggcgccgcccgccgcaggctttacggcctgcggcgggcggcttttatcgcattcagtttttgtgcgcgttcatataggcggtgaatttctgccagtcctcgcggctgaggtaatgcgtgcccgcgcgcaggtggtagccgatgtcgccgccgtgcagcaaatcgcccggcacaggggctttgccgcccatgcaaaggccgcgcaggccgagcgcctcaaaggccggggaggcggccagacaggcgcgcagctccgccttggggtccgcccacaggtcgcccgcggcgcttgcgacgtatacgcggcgcggtgcgatcagtgagagcaggaaatgctggtcgaatggcagcgcgtcgtctgtctccgtgtagttttgaaaatccgggcagaaccagaaggggaacacgcggcagatgtcggcggcggtctcgccggtcttgccgcggaacagcgccgcgcccgcgcagcccgattcgttggcaaagacaaagcggaaccgctcgtcgagcgcagcggcgagcagcgcggttttgccgaggcgcgagtggccggccacggcaacgttttgcaggttgatctccgagcgcgtctgcacgtaatccattacgatccgcgccgcccacgcccagacggcgatcttgcccggcgcgtgcgggtcgctgcggttgatattgagcacggcgccggcctttgcggcaaagtcatcgtcatccggggaaacgtcggcgtagccgaaggagaacatggcgaagccgaggtcgcaaagctcctccgcggggaagtagggatccggcacggcgggtgtgaaattgatgaacaccgcagcaggcacgggctgcgcgcttttcgggcagacgaagtggaacgggaacgtaaagcgtttgccgttctgccgtacatcggcctcgatccggcgcagcacggcctttccggcgcagaacgcgtcgtcggcaagcacctcgcggaactcgacggcgtccggctgtgcgggcgggaagccgtattcgtgcgcgcagagcagacgcagggcctccccgcggctcaccgcgtcaaagtgcggcaggttttcgggcagtttcatggtttacaactccttttctttccgggaaagatacctttattataggcgcgcaggccgcgcctgtaaatagaagaaattgactttttgcacgcgctcctgtagaataaaagcagaaatttttgggaggttcctgcatgcttacctatgaaaacccgattatccccggcttttacccggatccgagcatctgccgcgtcggggaggattactatctcgtcaacagctcgtttgagttttttcccggcgtgccgctgtggcacagccgcgatctgttccactgggagcagatcggccacgttctgacgcgtgacagccagcttccgcttcaaaactgcaacacctcgggcggcatctacgcgccgacgatccgcttccgtgacggccgcttttatatgattacgacgaatgtctcgaacggcggcaatttctttgtctggacggacgacatccgcggcgaatggtcggagccggtctacatcgatcagggcggcatcgacccatctctgttctgggacgacgacggcacggtctattacaccggcacgcacagcgacgaaaacgggatgcccggcatcggcatgttcccggtcgatctcgaaaccggtgcgcggctcggcgagacgaagatcatctggtacggcaccggcggcaagtgccccgaggggccgcatatctataagatcaacggctggtattatctgatgatcgccgagggcggcacggaatacggccacatggaaacgatcgcgcgcagccgctcggtctgggggccgtatgaatcctgcccgcataacccgatcgtcacgcaccgcaacgcgcactgcgaggtggatttccacgcggtcggccacgccgatctcgtcgaggcaccggacgggaaatggtggatggtctgccatgcgatccgcccgtcggttttcatgctccaccacaccggccgcgaaacgatgcttctgccggtcgaatgggacgaaaacggctggccggtcgtgaatgaaaataaatacatcactgccgaaatgcaggcggagggcgagggcgacgtccgcgtgcagcggagctggcgcgacgatttcacggcggatgcgccggcgccgcgctgggcgtatctgcgcaacccggaccgcagccgctacgcgttcggcggcggcctgacgctgcacggctctgcggatacgctcgatgacctcggcgcgccgacattcctcgccgtgcgccagcagcagtttgtgctgcgctatgagacgcagatgcagctttccggccatgcggatgcggcggccggcctcacgatcttccacacgaacgagcaccactacgagctgctcgcgcgccccgcggaaagcgggcttgccgtgcagctccgccgccgcgccgtcgatatgcagacgctttccgagccggtcgtttttgaaaatacaggcacactcgtgctgcgcatcgaggcggagcggatgaaatacacgttcctagccgggccggacgcctcgcgcctgcgcgtgatcggcacgggcagcacgcagcttctctccacggagtgcatgaactgtacgtttaccggctgctttgccggcatgttcgccgagggagactgcacggcgcacttcgcgtacttctccgtggaagatgcgcgggaggcgtgaggactgcgccccgtcggcagagagagtcgcgcggcacaggcgttttccgaatgagaaactgaaacaagggggggacgggaaaccgtctcctctttttgattttgaaaactctttttaaaaaactttttagaaaaaggcttgacatttacgctgcgtcataccctatactcgtggtacagggacgccgcggagcccctgaaaaagccttccgaaaggagtgcgtctatatggaatatacggtgcaggcgctggcggcgctttctggtgtgagccggcgcacgctgcattattacgattcgatcggccttctgcgccccgcgcgcatcgcggagaacggctaccgcatgtatggggcggcggagatcgaccgcctgcagcagattttgctctaccgggcattcggcatggagctcgccgggatccgggaaattctagacaatcccgcgtttgacgcgcaggccgcgctggagcagcacctgcacgcgcttctcgagagaaaggcgtcgattgagctgcaaatcagcagcgtcagaaagacgatacaggcgaaaaaaggagaatgtacaatgaaagacacggaaaaatttgagggcttccgcacgcggatgctcgcggagaatgaagaaaaatacggcggcgagctgcgccggaagtacggcgatgacgccgtcgatgcgtcaatctttaaggtgcgcggcatggcggaggcagattggcaggcggcggagacactgcgggagagggcggaggcgctgttccgcgaggctatgcccgccggagaccccgcgtgcgaggccgcgcagcaggcatgcgcggtgcacggcgaatggctccgccggttctggaaatcggggacctacaccaaagcggcgcatgcggcgctcggggcagcgtacgccggagacgcgcgctttgccgcctattatgaaacgcatgtcggcccgggcgcggcggcgtttatccgggatgcgctggcaatttacgccgaaaacgcaaaagcggaaaattagggcttgcattttccggtgaagtaacgtataatcttaatatgttccttcgccggtgtgatggaattggcagacgtagtggactcaaaatccaccggtagcgataccgtgccggttcgagtccggccaccggcaccatgaagggttgacaaaaaagatgtcaacccttttttcttagtattcatgcgggtttgcgggctttttgaagcaaaatccgaaaaacggttttaccgtagatgtccaaacagcaaaccgcagtaaaatccgttatagcggggcttccgcctgatttttcaggtcggaggccccgcttttttgcgtttaccattcttttttcccgcccacggaaccgtaaaagtttccggcagttatatagatagattaacgaaagccccaaatgggcaaatttcaaaccctcaagatacaagggggtagtgcgcccttttttagaaccgcttcgactggcaggccggggcggttcttcgcttttcccccctctcacactctcccccctaatactttaccagctgggaaagaacaatacttgttctcgaacaagagattctctccagcaagcttactcaaaaccagtaaaccttccaagttttcaacaatcgccaagaaaggatgcgaacaatcatgaacatcggtatagaccacggctattacgccatcaaaacccggcatttttctttcccagccggtatctcagaatattcccacgaaccctacaccctgcagaacacactggagtacggcgggaagttttatgtctgcggaaccggcagacagccgatcctgcgaaacaaaatggagaacgacaattactacctgcttacccttaccgccatcgccaaggaattgaaacagcgcggtgaaaaaacagagtgttccgtcaaactcgctgccggattgcctctggccggttttggccgtgagaaaaagccattccgggaatatcttctgcgttcttcccagccggtgtgcttcaaatttgagggaatcccctacaaagtaaccatcgaggatgtgaaactgtttccacagggatattccgccatcgccatccatcccgaacttatccagaatgagccttctgtccttctgatggacatcggcggatggacggtggacttgatgcggctggacaatggcgtccccaacgcttctacctgccgcagcttagagctcggcatgatccggtgtatcgatgaaaccaaagaacaggtacgccgggataccgggctgtctataaccgacgctcaagtggagcgtgttctggccggaaagccctgcagtatggatgaggatgcacggaatatcattcaaaaacaaggcaggctatatacagaacggcttctctcggcagccatggaatcggggtttgacctgaaagccatcccggtggtcatgctgggcggcggtgcagcggtggtcaagggcaacgtgagcgaacaggacgccctgtgccgggtttttgcccttttagacgacaaggtaaacgccgaaggattcgagcggattttggggcagttctcaggcggtgtgggcaagggatgacaagacccctgtatatgttccgccccaacctgcagaacgaggaacaccggaaagcatgggagattttgcaaagtgtgccggaaggccaaaaaagcgcctttctggtacgggcgattctggcgactgagcaacagagaaaattggaagccatcctgcgccgggtgctgcgggaggaactcaaagctgtgccttctcagcccatacagcagtcggagaaagcgatcccacaggagatgttggggttcctcggttctctgctgggagaagaataatcccaagatagcctttattggttgtgacgtttgttgagcctgctttggctgaaaggttgttgctcttgataatagctttatccggcgggttgcagtatgcttgtgttgcccgaaagggaaagaaaagaaaaaggagcgatggagcgtggaaaccaaaggcgtaacctgcaaaatcccgctggagctgcacaaccagatcagcgaggaaatccgggaaacggaaagcacaatgagcaagttcatcgaaatggtcatccgggaacattgtgagaaaggggctaacacagtcatggaaaaaggaaggacattagcatttcaggtaagcgaggagttgttccagagggtaaaggaataccttgaaaactacgagaaaacctaccaccgccgccttacccaaaaggagttcgtgatcagcctgatcgaagatgcgttgaaagaagccgatgaagaattcgaagcagccagagcagccgaacaggaagaacaggcagagagcggctgggaagccgcagaaaaccccgaaaccgacgaggacgaggaagtacccgacgatgaggaaccagagggctgggacgatgacagcgacgatgcagagacccctgccgaagatgaggggccggagagcgaggaagccgagcctgccaacgaatcccctgaagatgaagaaaccgaagaataaccctgctaacaacacccctgcaggactgaggtaccgcctcagccgcctgcgggggtgttttcatatagatttcatttcacgaaaaaggggcgatgtccattgattgtgttttaagcatataccaatttgtgaacaaggagcatgataggaaaaaccataacaattagaaaagaacgggaggtgaccgccatcgattgatttaaaagaccaatatttcggctgcgagattgagatgacggggctaacccgccagcaggcggcggaagcggtggcttccctgttcggaaccaccgctgtccattcccgttcttcccgcacctacgatctgtgggaggtaaccgacaatgagggcaagaaatggcggtttgtctacgattccagcatccatggtttccaccggattagacggcagcgggttgccatcggtgacggcgcctacaaagtggagatgaattcccccaaactggaatacagcgaaatgccaaaactgcaggaagtcgtccgtaccctccgccatgcgggggctgtggtgaatccaagctgcggaatgcacgtccatgtggacgcctccaagcataccccgcaaagtctcaaaaacgccctctccattatgtattccaaagaggatatcctgttcaaagccctcaatgtcaatgaaagccgggtggagcgctggtgccagaaagtacgggaacccatgctggaaaaaatccgcaagctgccaacaggcgtctctatggaccgtcttaaacgggaatggtatgaaggttctgacggaagctatgagcattacaactggacgaggtattatgctctgaaccttcattctgtgttttatcgcggtaccttggaatggcgctgttttgaaagcaccctccatgccggtaaggtgcgggcaaatatcacgctggcgcttgcgatttccgcacaggccatcaaccagagcaggaccgtcatgcgaaaaaccgagatcagcgaaaaccccgcctttaccttccgcaccttccttttgcggctgggcctcatcgggccggaatacaaaaatgtgcgggagcacttgctctcgaacctccccggtgaccgggcatggcggtatgacaaagcccaatatcccagcctgcagaaccgccaaaaccatgaaagataggagatgtttaaaaccaaaaatgatcaaaaaccaattaaccagctgagtttccatcgcgggcatgaaatatcagaacaagaagaaagccatggtgcgcgaagtgggtgcagcggcacgctgctttactttgcttatggaagcaatatgaacctaaaccagatggcgttccgctgccccgatgcggaagtgatagataccgtccgcttggaaggataccgccttgccttttgcgcgaacggcggcgggaatggcgtcgccaccattattccggcagaaggaagctgtgtggatggcgtcctctggaggatctccgaacgggatgaacagcatctggaccattacgagggttttcccttcctgtatggaaaggagtctgttgtggtaatggatcaggacggggtcagccgggaagtcatggcatataccatgaacagcccatatagggataccccggcactgccctccaaagcctatctggaaggaatcctcatcggctgcaggcagaatggaatcgaaaccgcccctgttttggaagcagtccggcttacccagaaggaattgccaaagaaagcagttccaaagaaaaaacaccatcgctggaaaagcggcgaagaacgataatttcagtatcggcccccgtgggtttgaggtttttcctcaatcctgcgggggcttttttgtattttacgacaaaggagaattgtatgaagaaacatttaaaaaagctgctgtccgttatactggcggcgctgctctgttttgggattttcccaagcagcgcccttgccaaagaatatgagtatgacgggtacatctccatgatcgaccatagcaccagagggtattccctcagttccaaccttcccgccccgtttggcggctacagttccaataagttcaccgaactgcggatcaatgacctgaaagccttccgcaccgcctattgcatccagttcagtgtaggcgtacacacgggtatcggctatgaccagtcggatgattacgctgcctttaccgccgagcagaaagcgctgatcaacaccgtcctaaccctgggttacaacgtggaaaccggcaccaaatacggcgggagcgccattgacgaatacatcgccacccaaatcctcatctggctcattgcccatgagcagtttggaactggatatgaggatcagatcgtcaatgaattcaccgtcaacagccccgccgcgaagcctatcttctaccagcttcgggaaaatgtcgtgaattaccacaccatcccgtcctttgctgccgatgatcccagcgcggttggggcatatacccacgacctcaaatataatgaaagcaccgggaaaaatgataccacgctggtggatgaaaacaatgtgctggacaatttcgccgtcagctatccgggtgtggacttttccatcagcggaaatcagcttcatgtttccaccgctgaaaccgagttcggcaccattaccgccgaaaagcggctgccttcttccattcccggagtggtcacaggcggcaccaaatactggctgcgggacgagtaccagaacgtggtcaccttcgatgtggaaggttccacagaacccgtaaagtgctacttttcccttgaaatcaaggcaggcaccctgcagcttgtcaagacctctgaggatggtaaagttgagggaatcccgttccacatttccggcaacgggattgagaaggacgttgtgacaggaccggatggcaccatccgggtggataacctccaagccggaacctataccgtaactgaacaggctccggaggaatatgtccagccaaaatcccagcaggtaaccatctatcccggccagacctccagcgtgagcttctccaatatcctgaaaaagtttaccgtggagatggagaaagtggactccgccaccggcgaagcacagggcgattccaccttggatggcgctgtgtacgggatgtttaaaggcgaaaccctgctggatacctacaccacggcgaatgggggtaaattcaccaccaaggaatacccctgcggcccggattattccattcgtgagatctcacccagtgaggggtacctgctggacgaaaccgtctatccggtaggcgcagaaccgggcaatttcacattggaaaacaacagcatccccatgactgccacagaggacgtgatcctcggcagcatcgccatcaccaagcataccgaccaacccgcagaggatgggaactccgaccagatcgagcagccggaggaaggggcggaattccaagtctatcttgccagcgcaggcagctacgagaacgctaaggaagaagaacgggatctcctgattaccgattcccatggttttgcccagtcgaaggaccttccatacggcctgtatgtggtgcatcagaccaaaggcgccgaggggcagaaatttgtcccggatttctctgtgttcatttccgagcataataaagtctactactttattctgaacaaccccacctttacctccctcatccgctttgagaagaaagacgccgaatccggcaaaattattcctctggcgggaaccgctgtcaaaatccgcaacgctgataccggcgagtgggtggtacagcacttgagctaccccagccctatcgatatcgacaccttcgtgacggacgccacaggtaccctcatgctgccggagcccctgggcttcggaaattacgaactggtggaacaacagagcccttggggatatgtgctcgacggagagccagtgccctttgtggtggacggttcacaggaagtcgttaccgttgagaaatacaatgttccgcagaaaggaacgattacggtttccaaagagggtgaaacattcagccatgtagtggaatccggcgggatgtaccagccccagtatgaggtgcagggacagccgggcgctgtttacgatatcaccgcgctggaagatatcgtcactccggatggtaccatccatctgaaagctggcgaactggcatccaccctgaccacagggagcgatgggaccgccacttcagaacccttgtatttgggccgttatcaaattttggagcgatccgcgccggacggcatggtaatcgatccggaaccaaaggaagtggttttgtcctatgcagggcaggaagtcgaaatcacctccgccagcgtcggcttctataacgagcgccagaaggtggagatttccctccaaaaactgctggagcaggatgaaaccttctccatcggcatgaatgaggaatggaaagccatcaccttcgggctgtttgccgcagaagaactgaccgccgccgatggaacctccatcccggcagacgggctgctggaaaccaccggcattgacgaaaacggaaatgccgtctttaaaacagacgtgccctgcggggcttccctgtatgtgcgggaaatcggtaccgatgatcactacattttgagcgatgagaaatacccggtggtgtttgaatacgccggtcaggatgtgtccaaggtggagatcaaggtcaacgatggagaagccattgaaaacaccttaaagcgcggcaaggtttccggctggaaggtggatcaggatggcttcgaattaggcggcgctgtcatcggtctgttccgttttgacgaaaccgagttcaccaaagaaaccgccctcatggttactgaaagcaatgaaatcgggtactttgagtttgataaggtaccggttggaaactttctcgtgcgtgaaatcgcacctccggaagccttcgtattgacggaagaaaccttcccagtggagatcacaggggacggacagaccgttgaaatcaccatcgaaaaccagatcatcaaaggcaccgccgaaaccaccaaggtggacgccgactatccggaccacaagctgtccggggctatttttgaagtttacgccgatgtggataacaacggcgaattccatgcggatatcgataagctggcgggagaaatggtcgaaaccgaaccgggtctctatcagatgaaggaccttgtgtacgggaactacttcctgcacgaaaaacaggcgccgaaatttttccagaaggacgatgggtattatcctttctccatcaccgaaaatgaagcgattgtgcggatcgaaaccgaagctggcgttggcttcctcaacaaagcgcagaccggttccctgaaggtggtaaagacagccgatgacgataagattgaagggcgcaccttcaaaatcagcggcaccgacttcatgggcaacgcctacgaacaggaattccagaccgatgagaacggtgaaatcaacgtcaccctccgggtaggcgaatacaccgtatccgaagtggctggcgaggatgccgaaaagtacattctgcccgatgaccagacggtagagatcaaggcgggtgaaaccacaacggtgaaaatgcattcgccggagtgatcgccgtcagattcaaggtaatagagattgccatctgcttcattatcggcaaaatggaaaataccgctgtcgctttctctcatagcgtcaatcccattcttaaatcccgaataggcgaaatcatttgtacccgaagcggcaaagataaagaaatcgttccattcgtgtctagaatcttttaccacacgctcataggtttctatgcttgccgccgggccgccgcttgacggcataaaatagcggaagtagtcaagggaatgttcaaaggttcgccaagttgccatagaacccattgaaaatccgcagaaagcccgataatcacgagaagcggcgattgcttcgggggtggtatcctcggcataggtgctgtatttgccctccaccgccgggataaggtcgtttatcagctcattgtgataattgtcggtcagcctcaaagcaagactgtaatccccgctgtcctccgggcttgtgttattgtaggtaggacaaacaacaatcataggctgaatttcgccgttcgcaatcccgtggtcgagaatatgtttcattctttgcggctcatcggggcttccgagataaacatattcgttgctccagccaccgtgcataaggtagaacacaggatactgcttgctttcgtcataaccatagggcagatacaccacggcgtgcttttggagtgtttggcttttgtcgtcgtaggaaaaggattcgtaagtatcgtaataaaggtcctgcaaagtgccctgttgttctgcctcggtcaagtaactgtcgggaatcgggatgagcgaagcaggaaaacggtttgtatctttctctgtatcagacggtgcaccgttgttttcagcttctaaactattttcttttcccgttacctcgctgcctgccgaggcgtcggggatctgtgaatcgcacgccgaaagaatgagcgacgacgcgatcagcattgtcaaaattacaataccctttttcatagcgttatctttcaaggctttctacccaagccgttacatcgctttcgctgacaccagaactgaaacgctggccttcctgccaatcgcccgtgcctgccatttcagagagcagctcgccgctttcgccaagttccgaactggaagatgtggcaaagggaatcacggtctttcctgtaaaatcgtttgcttcgataaatccatcaacgggccaagcagcaatgccccaccaaatcggatagccgataaaaaccgtgtcgtattcgttccaattatcgattgtgctttttacgagcggcacatcacgctcatcgggattatcgtgttcacgcacaacacggctgttatcgtccgcccagttaagatcggcgtcgctgtacggctcggcaggttctaactcgaacaaatcgccgtctgctgcggtggcaatataattcgccacattctcggtgctgccagttgcagagtagtagacaaccaatgttttttcggcttcatcggtaggattctgtgccacggcagaagattccggctgttcttcggattcggtaactccaagggaatttacccaatccacgatttcctgctctgcgtcctgaatctcgttgcgggaaatagatttgccgtccaataccgcagcgttcggctcaagctctttgattgtggaaatggtatccgaaaagccgctgccgccgtgggtgttaaagggaataatcgtcttgccggaaaaatcgtactcgtcaaagaaagaatacaggatcatcggcatatcgccccaccagttgggataaccgacaaagatattttcgtaggtatcaaagttttcaatcgtatctttgattttcggtctggcattgtcgttttgttctttttttgcaagatcaaccaattcgccgtggccggtgggatagggcgtttccggctcaatgcggaaaatgtcagccccgaccgtttcctgaatcacataagccatatattgtgtgtttcccagcacctcgccgtcaataaccacggtactttgttcctcgtcctgcgtcatattgttggggtcggtggtttcgggcattgagaagtacaccacaagatttttcccctctgtcttattcggcgtaggggtactctcgtttgtctgcgaactgctatcttcaggcacttcgtcaggtgcttcatttgccgagcaggctgccagtgacagcgccgtagcaagcgccataaaaagtgagataatctttttaatcgctttgcttcctttccgaatttaataacattccttgaagattgcaaggatttcttcgcgggtcatttttttgtaactgccgggcataagggcgcaggaatccgcaatcgctttcaagtcggtattttcgtttacgcccaagtcctgtaaagatactggcagtccaatttcggcaatgaaatcttccagagcctcaatacctgcaagtgcagtttcctcgtccgttttgccctctgccgaaacacccataacctcgattgcaaaccgtttgaatttcggcaagccgcatttgtaaatgtggcgatagtagacggggtgcagaacggcaagcccttctctatggttgtagtttgtatatgctccgagctggtgttccatttggtgacactcaaaatccatgcgtttccccagtttgattatacggttttctgccattgtcgccgcccacatcagattgcttcttgcggtgtagtcctgcggattccgaatggcggcacgcaggttgcggattacgcttcgcataagcgcctcggaaatatcgtccgatacattgtcctcgtttggctcgctgaaataagtctccataatgtgcgacagaatatcaaagctgccggacaccatctgctttttcggcacgctgtaagtataggtcggatcgagtagggcaaatttggggttgcatttcgggtaatctctgcctgttttaattttcaaatcctcgttggtaataactgcgccgccgttacactcactgcccgtacctgccacggtaacgattacaccgagaggtaacggctcgaagtcaaaaacacccggccttgcccaaaaatcttcccacgcactgccatcatagcgggcagcaatagaaatcgccttgcagcagtccataaccgaaccgccgccgattcccaaaagcagactgacaccgttttcctttgccagcttcgcaccctccaatacctttgcataggtgggattcgccataataccgctaaattccacaacggtttttcctgcggcttttaagatgtttattacctcgtcatagatgccgtttttcttgatcgagccgccgccatagcaaagcatagccgtgccgccgtaggctttcgtcaggcagcaaaggtattcctttacacagcctttgccgaaaaacacctttgtggagttttcaaaaataaagttgttcataagttttctcctgtattttcacgcttatcgattacatctacaatctctccgataaattcataatgcggcggcataccgaatttgttgtaaagattatccataatatccggggcgatatgctcttgctcaaactgatgccagtatattttacggcatacaaaagtaaggtttgcttcctcaaagacaacactatttttgtacgttcttggcgttaaaccagtcaatgaaaatttatctccgtcacgtcccgacttgcttccgataatccctaaatcttttttatgagattcatcaaaaaacgaaacggtgaaagtatcttctttcatcaggtattcgcttgtataacgcagagggttgatatatatggttacaataagtttgcctttgttaactgtcccccaaatatcgcctaaagttccccagccaatggtgcaaccgtcaaaatctttttcgtttcccgctgccgcaatcgcccattgccggtcaaacatattaaaaacctcaaatttttggtttctaaattcatcaagattcatatttgtatcctcctgtttattgctgaatcaatatgctttacataacttcaaaagctatcgtttgctttgtatctgctgttcccaaaaatcgacggcctcattaatccagccctcggcagccgtccttgttccgagaccgaagccgtggctgagtcccgcataatggtgaaattcggtcgggattcccagttcgtttaagcgattcagccgagcctccattgtgcgccagtttgcaataccgtcattttcacccacacaagcataggtcgacgggtcgctttcgctgtattcgctgtgacctgtgtactgcataatcacagccccggcctgcggtaaatctttttctccaaatgcggccgtgccgtaagagccgagccaagccgccattcttcctcctgccgatccaccccaaagggaataacaatcggtgtttaccgctaattcgtcggcattttcaaaaataaagctgattgctctcgctaaatcctcgcaggcggtttgtgcaccggggcggtagatcaaggcaaaggcgttgtagcccattttggataattccaaagcgtgggggaaactgtcgtgcattgcaccgacataggcaaatccaccgcctgcattgcataccgcaaaccgttcgccgggatttcctttgaagaagaacaagcctgtatcttcttttgcaggatcggccgttttttcttcatcggtataaatatcgtagaagattatatcgccgttttcggcgcggcttttcatatagtttgcaatctcaacggttttgtcaggggcgatgttgttgtaccaagtaagctccagttcgcctaatgtatcaccgctgtaatagccgctgtttacggggaatatcagtctgccgtaatcctcaaaggcagggtcgtttatcacatcggagatttttgtatctatcgtatatggttctgcatcattcggatttgtttgcacagtggtttctgctcctttgaagtcctcatctgattcggtactgttcatatccgcgctgcacccggccaagaaaacggctatgcaaaccagtaccgcagcagcattttttctcaaagccgtcaccaacctttctgtttacagtataaaagaaacgagacctcataagaagtctcgttttgttcatcagtttatacccaaaggttataacggcttgtttagtggtacaattccttgctcaccttttcggcagcgtccaaaaactgctgtacggcaggtgttggagcgggagaatgcaggattccataggggatacaatgattccattctacaggaataactttcaataacgggtggacactcgcccagccggggatagagagcaatacatcatttgtattctcacagcggttgaatatatccattccgtaaaaatcaaaatccacaatattgatttgcgggtgattctgccaaaggccgtcgcgaagctgatcgacatagcggctccagccacggtgcataagcagcagattttcgccgtagaggtcagaaagctgtaatttgtctttggccgccaatcggtgatgaatcgaaacagcacagtgaaacggacctctaatcaattccaatcccgcacaagcacgaacatctaacatcgtttcgtcgaaaatgccgccgactatatcaatgtttttacccaaattggctaagatttcccgggcgttttcgggagtattttcaaagggcacaatttggaatttgatatttgggagcaaggcttgaactctcgaccaaagttccataagaagctgtgcaggggtgataggcgatgaaccgatacgaataatatttctatcttcctgcattgcatttttggctcttgtaatggaatctctacaatattgtataatgtattttgaatcctgatatagagagtgtccggcctttgttaagtgtagccctctgtgcgtccgatcaaatagtttaacgcccaacgaatcctccagcaaattgatttgtttgataacagctgtaggtgtaataaaggattcctccgccgctttgttaaaactgcctgcgtccgctactcttataaatgtttcaagctgtgggttatacataagatttcacctgccttattgaggcgtattatcttttctccgtaaatctgtcggcttgttcgctgtttggggaatcatccaagaccgcccgaatttttgtattccgtctattctgcttccttcacatagtttttgagcacgccattcagagatttcccatttctgcgccgcttctctaactgatatgtagtccttttctatcctttgaaaagtacgcataaccgaataatcttacaattatattttattcggatatacgcattatgtcaagaagcaaacttatgtaatcaagtcgtctgcccagcagacggcttgtgattttaataggctggcgttccataattatagataacgctgctgccaatcaaataactgttttgcttgcaggcgccgccggaaatgccctcaacggtgtaaactgagccgcttttcacacgctcaacaattcccacatggttggttttcccaatcaaagaaaataatgtgtcccgcagagggcgtaaagctgccgtcctgacaaagtcccctttccctgaaccagttgagccttgaatacaacctgcgaatttgggaataataccattttcgatttaccagcactcgtttgcacaccacgaaacgaaacacgcgcaccattcgacacgcccggaaaaaccataccacgaccaataaggctcgccgccgaaccggaaataacctgcacttcgaggtctggcagagtggggagcataccgatgccctcggtttctttaaggttaaggaataacgaaaacagcagcctgtaaaaaacagactgctggattttctattgcaattccaaactgtagccgacttcacgaatacagtgcagataaatcccggaatcctttcccaaattcaatttgtgccggattgcctgcacatgatgaccgaccaacttccgagcttgtccatagtcgggttcttcccatatcctttcatagatttgggtatatgttaaaacacggttagggctttggagcagatacaggaaaatattgtactcggtttcggtaagggggctctcctgctgatcccgaaataatttccgtaggcttacgcagacttcgatgcccggaagtgatatcaccgattttgtccctgtttgcaccactctatttctggatgctgttttatattccttttcccgcaactccaaaatgattacttgtccgacaccattgtttccttcattctacgaccacctgcagagaaccgaaaaagttatctccttctaatgtaagatagttatctcccgtattcagtgcaacagagtatgtatctgcaccactgttctcggcaatgactttctcctcgtttttatctctccagcacagcttagcggagccggagtctattgttaatttataagttatggtaaggtcgtttcccttatcgcgatctaatcctgtaccgccaaagatgtattctacatcactgaaattttcatattcagcggaataagagccggtataggtatcttcacctttcgttttgtcaccctgcaaatctttttcctctgtaagagcgtattgactgaaatggtgtaaaagatcgttaaatccattcaacacatcgtctttgatatgatcgccgctgcatcccgtcatgcccaaagctaagcatagcgaaagcagaacagcggtcaaaagtttcaaggttttcatagtttcacccctgaataagtcccggtatggacatagcgacgatcgcaatggcgccgacagcgtaaatgctgttgattgcaacacatacctgcataagcttcgattttaccttgcctttggtataaacaagaatggaaaagatgcctgaaaaaatcataaaggcggcgtaactgagaatcataatttccgctgctggtgacttcaatgcccaatcgaagcagcgcaaaggcaaaattgtccacggaatgaacagcataatggtagaaacagcagttaaaattttgtttttcataggttttatctcctttcagatgcgccgtatcgtatgcaggacacagcaagtgcgagtattgtaataccgattgccaccggaagccacggaagccacgcaatctgtgtttcatagatgccatcggcggcttttccgtactcgatcgtcagtaaatagaatgggtagctcatcggataagcaaaccagatttttgtgtttatcatcagtacggaaggcacgatagacgccaacccgataccaactgagaaaataggtgttttgatcaaggcggaaattgcccaatacactgccgccatcggaattgcagcgatataaatgcaaaggacatttttgcatacatacaacggatcaaggacaaagttataatcctgcatgcctgtgacaatcgcagcgctgacgtaatacgccccaattgccataaccatctgcacagccgccagcataatcaaaacagtaaactttgcaaggcacatctttacggtgctgatcggcagggacagcattttcaaaattcctttgtttgttcgctctgtttgattgagcaggacggtgcagatgacaagcgacgccggaatcataaaccataccatacccataaagccttgaatgaaaaagttgttttcaggtgtgatcgggacgcccctcacatcgaaaatcatatcggaattgatcacgctcggaagccacatcataagaacaggggcaagcagaatcaaaaatatttttgagcggcggatctttgtaagttccacacctatcaaagatgaaaaattcattcaaagcacctcctcactttcagataaatcatttctgcaatgcccaaaaggacggtttccactccgcaaacagacaaaaacaatgttgcacggctattctctgttgcagcggcaagcgtttgatacggggaactgaaggggaacaaactcagcacggtattgtcctgtggcagaattgagagtgtaaacacaagaatcacaccgatgccaagggacacccacatatttttacaagctgacgcaatcaccagcatacccataacggtgggcagcgtaacgataatttgaaagcctgtggttttaagtatctccgccaaatcaaaggcgtagctcgggaaccaatagtttgcacagccgattaacgcggctatttctatcactgccataacggacagcagcaatgccgaaatgcaaaacttccctaagaacatatttccctgacggatcggaagcaccgacattttctgaatcgcattgccggcatactccgtgtggtacattatacaagctccgcagatcgcaatgagaatattcagcatagccatcatctgccagttcgcagacatcaataaatctattggatttccggtgagcaaggtaagctcctctgcctttacaagcatatagacaaccgggaatgccgccgcaaggagtccgccaacaaagaatgcaggaagatagccagtgcgtttgagttttttaaattcaatgaaaaggctcatattgcaccaccttttcttcggttatcttcatcaatcatagcgaggaaagtatcctccaaattatctgtcgggaaccctgcggcacgagcgcctgttttcagatcttccatcgtaccctcaaataaaagatgaccgtggtttaaaatgccaatatcatcagccatcaattcgacttcgggaagtaaatgagaagaaaccagcacggtgcagtcatatttttgcggcagggagcgaatcagggtgcgtatctcatgaattccaaccggatcaagaccattcgtcggctcgtcaagaatcagaatcggcggccggccaatcaatgcaccggccagccccaagcgctgtttcatgccgagagaatacttttttgcaagcctttttcggaattcagttaatcctaccagttccaatgcgccgtcaacgctgcttttcgggagtccgagaattttacggattatatcgaggttttcttctcccgtcaaattcccgtaaaaagcgggcgcttcaatgaatgagccgatttcttttaaaattgaaacacggtctgccggatgggtttttccgtcaatctgaaagctcccgcttgtcggctttgtaagcccgagaaacattttcatcgtggtggattttcctgccccattcggaccgagaaagccataaacgctgcccttgcgaatatggagatttaagttagacacagcagtaaaatccccataggttttcgttaaattttgagtttctatgatattcatcttgaggaatctcctttcctttactgcctttagtgtacgatggcgaccttgtgccaaccttctctctaccttacatttactttacatttggagtgtattgtcgaaaatccaaaaggatatggtataatacaaaaaaggagagattttgttgtggactataactacttaaaatacaaaaaaatcctcatcgtagacgatgaggtcggattgcttgaaatggtaacttctattttagagcaagacggcttcaaagaaatcaaaactgccggaacagtatcggaagcgctatctgtatgtaaggcatggaatccggagattgccgtcctagatgtcatgctgcctgacgggaacgggttttctctgtttgagcagatgagagcctttaccgaaattccggtgcttttcttaaccgctcgcggcgaagatgaggataagttaaaaggcttggggcttggtgcggacgattatatgacaaagccgtttttgccgaaagaactgctgctgcgcattgggatcatcttaaagcgttactacaaaggcgaaacgcctgtcgtacagctttcaggcagtcaaattgattttgaccgtgccgaagtcgtaaagggtggggaacattttcctcttactgcaaaagaacacgatatcttaggagcgctttaccgcaacgcaggcaggattgtgacaatcgaccagctttgcgaggcggcttggggcgataatccattcggatatgaaaactcgcttatggcgcatatccgcaggattcgtgaaaagatagaagtcagcccttcaaggccggtatcccttatcaccgttaaaggactgggctataagttggtgttagggggaaaataatatgagggatattacgagacttcttcggcggtttataggaatccttcttttgagtaccgtcctgctgatcgcactgaacatcgccattatagttattgtttctgcccatcaaacggcgaatggcagaccgtggacgatggcaaaagaaactgctgctgcattacagaaaacggagacagggtatcttctgccgaatgaaatttcagacgagttaattcaggagaatgcctgggcaatttacattgataatgaaacattggaagtcaaatggcataccgagaatctgcccgataccattccgttcagctatacgatttctgatatttccagtctgacacggggatatattgacggataccctacttatacaggagaagcaaaagatggattagtggtcgtcggatatcccaaagatcggttttggaaacatatgtcgccgagctgggattactattttatcaaaaatgctccttccattgtgcttatcgtcattgccgtcaatgtctttttgattttcctaatttatatgattgcaaactctaagctgctcaaatcagtcaggccaatcacgaacggcatacaggcgctcccgtcaggcgaacctgtgtcggtaaaggaacaggggattctgtctgagcttgcaaaaaaaatcaaccggacctccgggattcttcaggagcaaaagagggatttgcaaaagaaagaaacggcaagagcaaattggatttccggcgtttctcacgatatccgcacaccgctttctatggtgatggggtatgccggacaaattgaagaaaatgaagctttaccggaagcagaccgaaaaaaagcaagaattattcgccagcaaagcattaagatgaagaatctgattaacgatttaaatctggcatcaaaattagaatataatatgcagccgatcaatccggttcctgtgaatctagtggcggctgcccggcagagtgttgtggattttatgaatttggatatggaagaaaaatatccgatagaatggaaaaccgctgaagatcttacagcctgcgtgatacagggcgacaaagaattgctccggcgggcaatcgggaatttgattaccaatgcacaggttcataaccccgaaggctgtgaaatatcggtttgtgttgtagaggaagatgccgaatacaaaatcattgttgaggataacggcgtcggtattaccgatgaaaagttagagaagcttcgcaatacacctcactatatgatgagtgacagcgggactgacgagcctcggcacggtttagggcttttgattgttggacagattgttcacgcgcacaatggaacagtatccttcgaccacggagtaaacggcggttttgccgtgacggttaccttcccgctgaatatataatcctttggcagaaaaaccaagtcgtgtttcatttcttcgaactgttcgatgatttgtgttcctgattcagttttttatttcaccttgcagctctcatttttaatggggacctttttcgtcaactcttcccaagccgccgcaaactttgtatcgcttgcggcggcctttttgtcagcagaaaaccacgcgatagtcgcgtggttcaaaagaaggcttgtgccgatgatgtagaaataaaaactccttttgttgtaaaataggcttgcggtctggcaactgcaaggacaacaaaaggaggacgttcaaatgaacgacacaaacagtttatcacacacgaaatggaattgcaaatatcacatagtgttcgcaccgaagtacaggaggaaagtgttctacaaagaaaagagacgagaggtagggaaaatactgagaacactttgcgaatggaaaaagataaaaattgtggaagcagaagtatgtcccgatcatgtacatatgctggtagaaataccgccgaaagtagcgatatcaagctttatgggatatctgaaagggaaaagcagcctgatgatctacgaaaagtatccggagctgaaatacaaatatcggaatcgggaattttggtgcagaggatattacgtggacacagcagggaaaaatgcaaaaaagatacaagaatatattcaaaaccaattagaagaagacaaagcaggggaacagctgacgatgggaaacttctaaaagactcgtttacgagtagcaagtaacaaacttttcgcggctgccagatcgtaccaacgtgacgtgacacgtgccgctagtaatatagggctttgcccgcatatgaaatacccccggcttcgccgggggatatttatttgtaaaaagtcgccggcgcacgcacgccgctgcgtttctttttccgcgaaaagtcacgctcgggctgccggttcggctgtaaacgccctcgcaacggcttcctgccgctatcaaccttttgcgggtgcgcgcctccggcgcgtggtgtctttttgcggcgtaaacccatatttataatcaaagcatgccgctgcaggctgattctgcggtggcatgctttttgtgtctgttataaggttttaaagcgtttttacaaattcgatttcatgcttcagcaggatcccgttttcccctatgagcgggacaccgcgcttgatttcccgcaccttatccatagaattgtgatacagtgcagccatatcgaagccctttctttggtaaaacaggatcgcccggatattgtcgtttgtcgtgatgactttgactttgccggttcccgcagcttgtgcggcttccagaaccgcctgaacaagccgggtgccgattccatgattttccagcagagaatgcagaagtgtaatttcacattccccgccctcaatgcaataggtaatcacaccgatgacccgctggttttcgatgatgcagtacccgtcgctttcggacagatcgatgattttaccgcgaatgaccatgcgtatatcataccagtgctgcacaataaaagcgtttacgatttcgcggttgctgctgtcgaccttcaaaatttcatagctctgcatattctgtagcttcctttccgtttcaatttgatcggcacatatttttcgacgcgtgtcccttatgaagatcatagcggatgaccgcagggctgtcaatagcggttgttgatattttaggtgctggggtttttgccgataatccataaagtgttttgggcgtcgtaaaaagactgctgccggataaccgccgagtaaccgtcggccggctgggcgcatattttaaaaggaaagatagcggtttggaaagggggcggtacagtgatttcgatatggctgaacaggctcagcaatcttttatgtgtgaaaagtattgtgaccattgttctgacggcggttttttcgtatatgtctattgtcgggcgtgtttcagggcaggatttcctcacggttttttctgtggtgatcgcgttctatttcggcacgcagagccagcgcctgaatgaaaagctcaccggcagtgcggccgatggaaagcaggcttcgaaggataccgcgcagtaatggcgcacaggagaggaggcagaggtgatgggtgactatcgcagcaggccggaatcctgcgggggatgctggccgagctggagctgcaggggcgtgacagggcctgccggactgcagggcccgccgggtccgcagggaccggcgggtgagcgcgggccgcagggcgagcgcggctttcccggcccgatgggaccgcgcggaatggccggcctgcaggggccgcgcggtttgcagggggttcgaggggacataggtccgcggggtccgcagggtgtcatggggccgcagggaattcccggaagtcctggtccgactggcgcgaagggagatccggggcctcaaggcccgcagggaatcccaggcattgcgggcgagcgcggggagcgcggcgaaaggggaccacagggagagcaaggtgtgcagggtgagcagggtcccaagggcgagcccggcccgcagggggctcccggagaagtaggcttgcagggcccggcaggcccgcagggcgaaaagggcgaacgcggcgctgctggtccgcagggacccgcaggcccgcaaggaattcccggcccgcccggtgagccgggggcgaaaggcgagcggggaatccccggcccgaccggccctgcgcctgcggtggaggtcggtacggttcaggccggggcggttccgcaggtcacagcccgacaaaccgattcgggcgtctttctcgattttgtcatcccggccggtgcgaccggcacgcagggggagcgcggcgtgccgggacttgccggcataccgggagaaaagggcgaaacgggagaggcaggcccacggggcgaaaaaggcgagcagggggcgaccggcccgcagggcccgaccggcgccacgcccacggttgagatcggcacggtggatgcgggtcaggtgcccagcgtgacggcaagaccctcggaaagcggcgttctgctggattttgtcgttccgatcggcgcggccggcccaaagggggaggccggcgcacaggggatgaccggcccgcagggcgaaaaaggcgagcgcggcgaaaaaggcgaacaaggcccggcgggcgatattggtgcaaccggcgcaacgggaccaaaaggcgataccggagagaccggagccacagggccaacaggtgccacaggcccagccggcgcttctggtgtgacgggtccaaagggcgataccggtgcggctggtgcaacaggcccaaaaggagatacagggccgatcggcccaatcggcccaacgggtccgacaggttcgacgggcaacacgggcccaaccggcgctgtggggccgactggtcccacgggcgctgccggcgtgcagggcacaaaaggcaatacgggcccgcagggcgctgcgggtgaaacgccgaaggtcgcggtggtcgagaataccaagaccggttaccggctcagctttacaacggccgaacagcagattacgacgccgaatctcaaatcgaatgcggaggtttacaatgcgaatctgtccgcgagcggcagcgtgctgcgcgtcccgctggaggggctgagcctgagcctgcaaaatacgtctgcaaacagcctgcgcatatctgttcagccggccgcggcaggggtgccggtcttggcggatatacggcgcgtcagtatttacgacggggcggttgacgcgcagaccaataacaatgtgacggtttcgggaacgctcgtactcgacgatatcgtctacacccagtcgcaggaaatgcactggatacggatgcgcgtgcaggatcccggcacaaagctctggtccatgtgcgaggtgcgcacctttgcatcgcagggcggcgcacgcaccaccgtgtgggtggagtgggtgtatgtcggggcgtcctttatagcgccgcagtaagggcgccgtctgccggaaaacagaatacaagggaaagccgcctctggccgttggaccggggcggctttccggcttttcagaaattgcgccggcgcagcgcggagaaatgtctgcccggcgattgattatccgggcctgagatggtatactgaaatgcggaaaatgaaactatggaggcgaagagatttgagaggaaaggtactttggcggcgcacggacgcggcactgcgcggcttttgtaagcgaacgagcggggggcacgcgcagtgcgggcggccggtatgaagggggagagccgcgcggtcgtcctgcgcatcctgtcgtacttaaagccgtttaaaaaggcgtttttgctcgccggtcttttgcttgcgggctctaccgtgatcggctttctgcagccgctcgtcattcagaccatcacggacgacggcatgctgcaaaaaaaaatgtcggtactcgtgcgcgccgttctggcgctggccgcgctggtcctcctgaatcaggccggcgaaatgctgcagacgcgcgtttttgccgacgtgcacaacgcttcgttttacgcgcttttccagcaggcgtttcaaaagctcctgcacctgaaaaaaagctatttcgaggataagaataatgcggagatcctgagcttcctgcaaatggacgtctcgcaggtttcctcgatcactgaccgttacacgatcatgagcgtgggctatgtgttccgcatcatcagcggactgatcggcctttttatcatcagctggaagctggcgctgattgtgcttgcgatggtgccggtcaaattcctgctggtgcgcacgctttcgaagcggcgggaaaaggcgatggaggagatgctcgaatcgagccgggatttttcccgctggttcggcgacaatctgaacggcgtggacgagatcaagctgtggaacctgttcgaaagccgggataaggcgtttcgtgaaaaacagcagaaagtgctccggctgcaaaagcgcgatacgatgatcgacgcatggaatactttgtgggaatcgctgctcgaatggggcgtcacgctgctgctctatctcatcggcggcatcatgatttgcagcggcagcctgacgatcggcgcggtgtttgcatttgcctcctattccggctacgtgaccggcccggtctcggcgctgatgaatctaaagatgtactttgcgcacgttttgccctcggcaaagcggctgttccgcttcctcgatatggagatcgaaacggatgcgggggagaagctgcaccgccgcagagcgccgcggctcgcgttcgagcacgtcgggttccgctatgaggagaaccgagagatcctgcgggacgtcagcttccacgtggagccgggcgaaaaaattgcgatcatcgggcagaacggcagcggaaaatcgacgattctgaacctgcttctgcgcttctacgagccgcggaccggcgcggtgctcgtcgatggctgcgacgtgcgcgcgttttcgcttgagagctaccgcgggctgttctcggttgtcagtcaggagccgtacctgttcttcggcagtgttgcggaaaatatcgatctctccggcagtgttgagccggcgcgcgtggaagcggcgatgcgcgtcagcggggtgtccggctatgtcggcaggatgcccgagggcgagcgcacgcagatcggccgcaacggcgcgcgcctgtcaggcggggagaagcagaagctcgccgtcgcgcgcgcactgctgcgcgatgcgccgatcgtgattctggacgaggcgacggccggcttcgacgtggagtccgatacatacctgcacggcgtcatcgtgcacgagatgcgggaaaagtcggtcatcatgatcacacaccactacgagcacctagagggtatggaccgcgtctaccgcctcgaggacggatgcctgcggctgtacgatggagaaaacgcgtgacgcgaaggctgctcaacggtgaacggcggattttcaaaagatttttgaagaaacatcttgctttttccattcaattcgtgtataataaattgcgttgcccgggtgtagcgcagttttggtagcgcgcttgaatggggttcaagaggccgcaggttcaactcctgtcactcggaccaatttttctcctaatgtatgcgcacagtaatgtgctgtgcgcatcgattaagagaaaagcattggtggtgcaatgctttttctgataatcttgagattgtacgtcatacctagcctgtctcaaacaggctgtgcagagacctttcctttgatccgtaaagtaaatggttgtgcttacaccgttttagcgtcggaacaagttttctaaggtgtgttgcgcagaatgcacggtcaaacaccttgtatcgtgatcgcctcagtcggcagtcctctgggtatgggtattacgttttcaaggtgcagtgtttttactttgtacacagacgtgtacaaaggtacaaaaaaggccttcctccgacaaaaagcggaaaaggctcttgcaaacagattccttgtgtgctataattaacaaaggaatacaagtctcacgagttccttttcagatacgctatatctgtcggggactgctgcttccaacggattgccgtccagaggaagaagccgtgaggctttttttgtatacaaattttattatatcacttctcgcactatactgcaagtgttttttgataagaaattaaaatttgagctgccgattttctcggcagcctttttgtcagcagaaaaccacgcgatagtcgcgtggttcaaaagaaggcttgtgccgatgatgtagaaataaaaactccttttgttgtaaaataggcttgcggtctggcaactgcaaggacaacaaaaggaggacgttcaaatgaacgacacaaacagtttatcacacacgaaatggaattgcaaatatcacatagtgttcgcaccgaagtacaggaggaaagtgttctacaaagaaaagagacgagaggtagggaaaatactgagaacactttgcgaatggaaaaagataaaaattgtggaagcagaagtatgtcccgatcatgtacatatgctggtagaaataccgccgaaagtagcgatatcaagctttatgggatatctgaaagggaaaagcagcctgatgatctacgaaaagtatccggagctgaaatacaaatatcggaatcgggaattttggtgcagaggatattacgtggacacagcagggaaaaatgcaaaaaagatacaagaatatattcaaaaccaattagaagaagacaaagcaggggaacagctgacgatgggaaacttctaaaagactcgtttacgagtagcaagtaacaaacttttcgcggctgccagatcgtaccaacgtgacgtgacacgtgccgctagtaatatagggctttgcccgcatatgaaatacccccggcttcgccgggggatatttattatttacggatcaatttccgcatttgttcggcaaggtgcttctggctgacagttacatatgttttcagtgtaaaggcagggtctgtgcggccgagaatctccgcgaggctttttaggccggcatcggattcaaaaaggcgggaggcaaaggtatggcgcagcatgtgcggcgtcacatgacgtattccggcgattcttgaaactttggtacatatgtaacgtatatgtccgtctgtcattttttctccgtttacatggaagatatattcgcaggatttcctttgtgccagtgtgtgcagtatgcttgtcacttgggggattatgggaatgttccgaatgccggttgttgttttgctctcacagacttggatgtagtcttgcttgctgttccaatctttccagcggaggttccgcagttcattccttcgcaggccggttaggagataagttaggatcatgcagtgatccataaatgagagctgcgtaaggacgctttcaaaggcgtcttgttcggggatagtcataccggaaaccttttttcgcgccgcatgctttggaatctgtacctcacgaatcggattgcagaaacaaatgttattccgcacagcttcctgataggcttcgcagtagacgaccttaatatgagctacagaagatttggagtagacggataatgtcgcctgcgttcatgctgtccgtcaatagataaaacaccaaagatcacctctcgaaacgagttgtcaaggactttttaatcaaattcacattttcagcctagggtcaacatggcccgaaccggcaaagcgccccgcagcgacttgtgtccgttgcggggcgcttacaatcacatctgctgtatctcgtttttgagcatacgcttgattttgctgctcatggtttcggtgcttgtattgctgaaatggacgcgcaccttgtaggtggtcttaccgattttctttaccagcgcgggggcgtcctccggcgctctagccggggtagtgtctgcggtctgcatggtgcgggtttcttcgctcatggcgctcctttctccgagcggggctgcgccgtccggcacaaaattacttatgcttacggtttacaatgtcttttgccgcctgtttggtgaccccggcggatggcaacgctgactttgctgctgctgacacactccctccgggagatttctggctggctgataccggctatgtagtaggcaaagacgcggcgggcctgtgtggggggcatgagccagagcctccggcaaggcggccagcagccgcagatgggcggcccgttcctcgcgctccaccagaatatcctccggagatctgccgtgttccaacgcgtagttctccgtccagctatatgcgtccagagagaagtaggcgcggtggtagaccttccggcgttcatagttgttcatctcgcgctgggcctgccgaatgaccgcccaaacctcatcgctgacctccacaaactcgtcatgccggtagtggggataaatcccccgcagattgattgttttcataggcttacctcctgaaaatgggagaggcgggcaacttgtccgctgtccgcctcccgctgggataagggaaacaatccctttcacttggtagcccgaaaaggggtcatttgtcaggggagttcgcaaagaatttcaaaaattttttccgaaccgcgtcaatgctctcatagacggatactttggagcagccgtacaccgtcccgatctccgcaagggtcagcccgtccagagcatagagcaggaatcggcggcgctgggcctcggtacaggtgtccagaacggccatcagctcgcccagcgtttccatgcggcaaatgtattcctccggcgtttcgccgtagatacccacaccctcggtgacaactatgtattcgtcaaactcccagccatcccaatgccgccgctgctcgtgggacaggttctcagctttgtggtcggcccggtcaagaaattcatagacttccggtgtgaactccacggccacggcttgtccgttgtaattgatggtgacttccatctgcctttcctccgttcagatttttgcgggaaaatctgaacggggcggtggggaacggcaccgggggcgaggttcgggccatgtttgcccgatgttccggccccataggtatgaaaaaacgcccggacagcagaaagctattcgagcgcaaaaaacacggtattcagttacaatgtgacaattttcgcactggctgccggacggggccggtttggtggccgggatttttttgacgacagtacaaatatcgtctgaatttgtcggcggtcagtgtgcttcacggcggctccctcctaaagccgccgtgtcagcgtataggcgtcactcctttgtcgggggcataaggaacggcggcctcgatgtaatcaaaaccgccgcagtgccctgaaaattcattatgggcgcacgaagctgcctgtcctgcaacgttttttttcttttcccgtctggcggggcagattaaaacgatatttatttttcttatacctcaatcaacccttttgcatttccagtaaatggcaaaccataaaaatagacctgccaaagtaataattcctttgttccatagccaaatattattttgatctccggcaaatcggataaacaagtagacatattctacccctggaaatcttaacaggcttcgcgtcaataaaactatcagccatataaccccacaaactaatgttgcaatatgttcttgcctacatataatccctaacaaggcacacagcgacgataaaaagaatgttggtgggaaatacagcacaatcaattcccatattggcatttcgtatcgcataactgacgcgcctgccatgctaaaaaccgcgaataaaccggatattgcaaaagcgattatgtaacgtaacaatacccatttgaaaagagatttgctttgtgctgcaataatatcaaaattactgtctgctcttgtttttccccattcaccaacaacgattgtaacaaaaaacggaaatatcacttcaaagctgaccgggtaaaaatcaagcagatctccggctatgatggaaagaacaatcatagcaaccgtaaaggccgctgatacgataaagaaatttatcccgaaaatttttacttcgctttcaattcgcgctttcattctgacctccaaaacttgtgtttcaaaaacagcaggctgccaaacacaagaccgcttcctgcaaggaaaaatccatttgcaataacgctccccatatcaacaaacggccatctcggatgcacccatatcaaacggactaaatcgccggaagtaatcaagtaaaatggcattgcctctgccgagcctacataggtggcattaaacccaaacaatattgcagccagaatatagaataagcgaatgtccatcattcccggtaaggcaatcgagcaaaagctgacaaataaactcactggaactaaagaaacaaagattgcttttaccaacgggacaatacattcaatcagggaaatttcaaatggcgcagcaataaaataaattgtcgtgttaagtaaaagaaaaatacactgcatcctttcaatgcccgctttgccattatggagcgtatcgtatcatagacgaaaagaataccacacccacacacccatatccaacaggcgatataaaatccatttaaccattcctgtgtttctggtgatatgagaaatacatccggtgaaaggaatggaacgcaaaaaaggatcataccgcaaagcggaaaccatagcggcagcgtacaacgcaggatgtgattgataaaaagagataaaacacaaaatataccgccaatagcagacacaaaaataatcgcattaaaaatgttaccgagtatctgcatctgttttctcctgctggtcgatcaaactctttagctcatgcaattcatcagacgaaagattgccgtttttgacaaatcccattaccatcttagacagggaaccatcatatacgcggcttagaaaactgcggctttccgcaagctggcaatcactttctgatactgctggataatataaatatccctttccttgacgttttgtagtcaatgctcctttttttaccaaacgggcaaggtatgtctgaatagttgttttgctccaacctgtttcttttaatttgtctaatatttcgggaagtgtttgaggagaattactccaaacaatcttcatcactcgccactctgactctgaaatagaaagttgctgccccataaggcgcctcctttgattgatgctgtgtagtttattctattatagcattggaactacatggtgtcaatcattgcaatgggggctttcttaaaatttacaataagcaggggctgcaaaacagctccacttaaaacctattgataaatcagttctatcaggacaatttcctccacctgcgctttcagcgtattcatcagccccacccagcgcatggggggcacgggccttcagttcctcggtgacgcccgccgcctccatcatgcggggcagcatggcgtccatccgttcacgcgccacccggtcaatctccaacaggtgcgggtacagcttttcgttcaatatcaaactgctgtaaaggccgggccggtgttccttcaggtagcgttgctgcatacggccatacttgccgatgggggcctccggctgctcggaaagtttcaggttggggatgtagtaatccccacagcgggtgtaaatcaattcgctcatgttcgtcctcctttgcactgtgatggttaaactgcggcgctggccggtaaggtggccttgcgcggctcctgtctgggcaactggctgacagggataaaaatgccttttgccatgtcctcggcccggatcgcggcctttgccgcctccacctgggccttgcgcttggcgttgtagcgttcttcccattctttcttgcttgccgtttgcgccttgcggcgcaagtagttctggtgaagcctgtctttgcgttcctccttcttccgtggttcttcctgttctccggggtcaggggaaccggctgcaaggcgggcgggatataccgacccacaaaattgaagtagatttcaacctcctgcgtggtgttctggctgcctttgcgggcgcgttcatgaacaaggattttctctgcaaactcgttgagcatggtatttgtcagtgtgtcgaaattctcatcccccaaatgcgccatgtcgggaaagtgccttttggttatggagatgggcgctttttcaatctcactggcccataccggacggataccgcaccgggaagcagccagagggaacacgccaatcccgtcgaaaaggcttcccagcttaatgtccggcatggcccggggtgccgtgtcccttcacggcaagcaccccttccagtgtggtcgccgcaatgcccagccgcccggcaaccgcaatatcattttttacatcctcgtccacagcgctgccgcagacaatcagggtgtgggagcgccgcagcatatcccggcgcatatcaatcccagccttgtgttcctcgggaacgctgtcattcaaaaacagcggcagatacaagagcgggcagatcggggaaaagcccgcctcataagcaagacggcagtagtgggccgccagctccatatcaacatccggctcgccgctccatgcggcggtcaggtatgctaaaggtcgtttcattggttgagcctccatttctgttttggtttagggaaaagcaaggtatcgcccaacccctccgccccttcccccgggaaggggaacggctctggagaatttatatccccgtcgcttgaccgggaaaaagcataaccgggagaaatccgtcaagggtgcctctggcaccgcctgcggcggcgctgcccttgactgattttcccggctatgctacggaataactggcgacggggaatgatttatatctccagagcttcggggcgcggggcagagccccgcaatcctcgggcaatgttgacccgaagtttcggcttacttttcctgttcgtttttcttctccggcttttcgtgttccttctgctggcccttccagtcgtccagcagcttgatgatttggtccttcatttccctcggcgtagtttccttgccgaaatacttgctcagttccgcacctgtcaaaatcactttgtctacctcctttttgtcctccatcataatgccgtcgatcacatccccgttgagcagcttcttttcgtccagctcacgcatacgctttgcctgcgcctgtgaaggcgaggactgctggctgtcaatggcgacggcgatatagttctggttcttcttgccgatataggaaagctccaccgccgtagtaaagcccagctttttttcatccatcagcttcatcaggtcgggaaccagctcattgagccggatataccgctgcacctgcttgaccgccatcttattgcgctcggctacaatttcgttggagcgttttcctgcgtccttcgggtcaatctggcccgaagtgcgggagccctggtgcttgatggcctcaagctgcattttcaaggctttggcccgctcactggggaggatttcttcacgctggttgagattgtcctccaccatctgtgtgatggcttcatcgtccgtcagattgcgaacaatacagggcatatccgcatatccggcaagctcgctggccttctggcggcggtggccggacacgatctcatagccgccatcctcacggggacggacgatagcgggctgggtaacgcccttgtccttgacgctggacaccatagcccgcatttcttcatcgtctcggacttcaaagggatggttcttgaaggcgtggagctcgttcagcttgatatagacgatctgctccttgccccggcgtggtgcatccttcggcttctcgggtcccttcggagcggaagcggcctgtaccgttggagctgcttttttctccggttcctttttgaccgccttttccggtttctgtgcgggggctttgggcttcggggctgcggccttgtccttatctgctttcgggggacggccccggcgctttggctgttccggctctttgggtttttcctccgctttcttcggagcctccggctgcttttccggtttttccgtttttgccgggtcaggctttttcacgccgggagctgccgcccgttcctcggctttcttttccttcataatttcagcgaagttatagacagaaacctgtggggtctttacctctggttccgtctttttttccggctccggggaaacggaaaccttctccggctctttttggggagcgggaggcgtttccttgcccggcccgctatccgttaccggctgttccggcgtttttgtggttttatcatctgccataagcatttacctcctgtttttgggcatgaaaaaaggggctcaacttttcagtcaagcccccgtgggaagttcctcctttctccgccatgatacaaaaataccgcccgtagtctcgtttgggcggtactttgtgtaagattggcagtccattattaagttttttattatgttccctttgtacaccgttgcaaacaaagccgcagagtagaagcaaaaactgcagcgcaggaaaggattagatcaaagagggaatcaaatcagtatttagagaaatcgaaggagtgtagtatcaaatgaaaaaaagatggatttcactacttgttgcattagctttgactgtgtccgcattcgctggatgcggatcaggcgatactgtgccggcggctgatgacaattccgccagcagcggagaagggaatggggagctcgaatatgcagaattagactggtatctggatttgggagaaaagccggatatttccatagtgaatgatgccttgaacgagtatctgatggaaaaaataaatacaaaggtaaatctgcacattcttagtgcggatgaatatgcaaccaaactgcctacaatgctcagtgctggacaagacgtaggtattgtaacctataacagcagcgtcaattatacagtccacacgaagcaggggtcatttttcccgctgaacgatctccttgaccagtacggaactgggattaagggcgagttcagcgatgacgtctggaatgccatgcgaattgatggagagatttacggtattccggctttgaaagacaactgctatattatgaatatgatttataatgaagaaatggcagaagaactgggtctggacatggaagggcttgagtttaaaaattggagagggaacgaagatttcttcacgcaggcactgcagcttagaaatgaaaaacacccggagatggaaggaaaaccgcttctgatggatattgcgtcggaattcccttattatttcaatgtagaaacgtttttgggaaacaattatacggctgtttgcaatatctctggaattgatgatgtagctggttatggctcagacaccgcattcaacctctatgcaacagatgaataccgtgagttctgcctgatgaagcaacgtatggtagaaaacggcgtctatgcatatgattacgctgattacccggatagtttatatgatggttcattactggcttgcgctggctggggatttacgtacatcagtgatcatttatacagtgatacgtatacaactcggcttaaagtagcggaaaatgtttggacggatacaaataactatattggtaccggcagcgctattgcagcgaattgtgcagatccagaacgggctatgatggtgctggagcttgtaaatacagattcctacattgctaccatgctgcgctttggtgttgagggtgagcattgggtaattgatgataacgggaatatgacaatggaaggaagctctagaaatagcggtgatccggtagatcgtggatattactactggtatggcgcgtcgttcggcaacttgaccgttgttgatgcgccggaagacctcacaggaccggataatattatgatgaaaaagattgtagagtataataacagtgcgattcttccggagcatatgggatttgtgctgaataccgatccgattacaaatgagattgctgcatgcagcaatgttatttcagaatatgcaagcacgctggcgagaggacagtatgattcgcaggatgctgtgaatcaggcagtggatgactttaaccagaagctgaaggacaacggtgttgaccggattctgacagaggttcaatctcagcttgacgcgtggagcgctgagaacaaatgataatgattcttgaaaaataatccgattgcgttcagtgcagctggtgtgttccaacaactgtgatttggaacataccggctgttgccgcaatagaaaaaatttgtacaatacttattttgacgatataaggagaagaaaatgaaacgggttgccgttgttactaaaaagaaaaatgatatactgaccattttagaaagaacctcaggcattcaggtggagcagcttgcgccggagggcctcggaagctgtgcgttggcggactttgatgcctttgtacttctgggcggtacagaggaagcgccgtgctgcttgaacggtgtggatcgttttgcaatggaaaaagagattgcaaaaggaaaacgagtttttgcggagttttacgaaagcataggtccggaccagtattttttggagaagcaatccacgcgctacagccgaatggtttatatagcggagaatgggatgatcgaggggctgtcatttggagatattttggaggagcagtgcaatgtatatacgccgaagcatatgaaaagtcctctgggcaagcctcttttgattacgcaggagcatatctgtgcgcatgatcatgtgacgccagaggccggatttttagatgacgaaaaaaataaaacgctttggtttgaaacggaaagccttttgatctgtaacttccgtctctgcaattttatccgggctacctttgcaccgaaaaaaagctggagaaggctgctgaattttatcctttcgtgggtgacggagacagaagttcaaacggaggtgcttccggaccattatacgcaggggcactataaggcggagctttcctttgaaatgcaggcaaatgctgctgtgaagcgtgcaatgggttggtttgacgatgcggaaatcctgctgtctgaaggacgccgcggcatgcgtgagggctttggcacagagatctacccggacggtacccgtagaagaaccatgcccattcgagatgactgcatgggtgaggtgggtatgatgtacgctatggattatgtcgtaaacggtactgcccgtagcttgcaaattgcggataatctgttttcctactgcttcgattatatgcagcgtaaaaatgctggaatttttgaggggatgattggctggacagactctgcgtggggcgtgtgctatacgcatgatacggggcggttactggtaggtgaattgctgaagaacatgtatttggggacaaacagtcacatgaaagaaattcaggcaggactggactatctgattcgcacctcaggcagcgatggccttcgtgcgaggaggctcgacaatgccaatctcagtgagaagcgtatccgcgaaattcaaagtaagccatgtgatgacccggagccgggagacccgtatttttttaccgcgcttctgatgttttataaactgaccggtaaggcacagtacaaggaggcggggatccgcggttttgaagcttttttgaaaatatatccgtcctgccggggaagcatctatacaaccagccgactgaccggaacgattctggggctctcttggctttactataccacaagggaggagcgtcataaaaaggtgctgtatgatactgtggcgcagcttcaaacggtgcgtcaccccaatggcggttatctggagtgggtgtttaacggtgaggtccctaaaccgaatattggagacgaaggctctatgctagtggaaaatggaaatccgattgtggataatctgtatgtggtgaactggcttcctctgggatttattcaggcatatttctgtacaggggatgtgtatttttacgagctttggaaagatattactgaatattttattcatatgcagattcacagcagagatccgctgatcaatggtacatggccgagaagctcggatatggaaaagctggaggtttacgcgatcccgaatgacattggctgggggccgtggtctattgaaagtggatggacgatggggccggtttgcgcaggtatcctaatcggcctgcacgcagataagctgaaacgtttctatacatgctgaagtgcttatatgtattctgtaatatatctacaggaggagaccatagccgagtttatggaaaatggtctgggggccgagtctaatgacgaactgggctatagcaagcacgactacaagcacgacctataagaacaaggacacggacaacagccgtaacgggtacagcagaaaaacgctgcgtaccagctttggggaacgtggatgtgtccgttccccatgatcggaaagacgagtttgagtcttgtgcgcagcgaagggcaggttgtaaagaaggcggtatacatcgcaattggcatcggtcaggacagcagcgtgaaaggaaaatcaaagcggtgacaaggctgcagcaggcgccggcttcaagttttgcgtaggctctggtgcttaaaagcaggcggtgagccatttctccctgagtaatgcctgaagctgcgcgcgtccgtaaaatggaggcgcgcagataagccttgatttctttcgggaataacttttcttggaaaatctcataattttccagaatttaccgaaattctacaaaagaacaggaattacaggccatgaattaaagctcaggaaagtaaggagaaccggaacgcatcaaagcaaaaatgaggcgtaccagcttctttcgtaggccagcagcttgtccggagaatcgaaacgtgaaaagtccccgacctcagcgagaatcatggcggccatgcggaagcccatgccgggaattgtagtaatggtagaataggggcatccatcaaggattgaatctgctcttcaatttaatctctgtatccagttcacgaatgaggcggatggtgagctgtaattcaaggggcttgcaaattttttcaggtaatctacctctgctcgcagccgctggttctctgcaataaggtcttcttcaaccgccttagacaacttggccggccgactgctgcttttttgcccacgccgttctaccgccaagccttccggcccttcttcaagatagattcgctcccggtgtttaatgatgtcatggtcattgatttcaaactttctcatcacttcgcatatacgccgacgtttctctcgcattgtctcgactaccgttcgcttgaattccggcgtgtaacgtttgttggggattccttttggcataataaagccctccaattgttagatagtgtattacactgtctagcaattgggggcttttcattgttggatgaggggcatttttgactttttcaaatagaaatagcctgtcatacagtctcgtatcatgtggatatacagaattcaaattcgcacactttttctcaaaatgcagttcagctataatatgaacagaggaattaaaaaaaattcccccctctccaccgaaactccacctttgtgtgttacactacccttggaggtgtaagcaatgtcaaaaatgattttgattatagaggatgaagaatccattcagaatatcatcaaggcgtttctggaggatgcaggctacacggtggttctggctgctgatggtcttgaagggattgagcggttccgggcgaacaagcctgatctggtgcttttagatttaatgctcccgaaaattgacggctttgccgtgtgtgaaatcctgcggaaagagagccagattcccattattatgcttactgcattggatgatgacgacagccagatgaagggctttgacgctctggcagatgattacattaccaagcccttttccatgccggttgtgatgaagcacatcgaagcggtgctgcgccgtgcggagcagggtggcgctgcccacaatgacgtgatccgctataaggaaatcactgtggatacggacagtcttaccgtccttgtgggaacagaaagcgttttcctgactactagagaatttgagattttgaagctccttttagagaatcagggccgggtggtgtccagagaaagactgctggacacggtttggggctatgactatattggtgacgaaaaaatcgtgaatacccacatcaagaacatccgcaagaagctgggggtggactacatcgaaaccatgagaggggcgggatataaaattgagaaggaagattagtcaaagcattcaggtcaaaacctttctcagtatgctggcgctgctggtggtctgctgcattatcatttacggcatggtgatgattttcctgccgagaaattaccgtacggagctggaaggacaaatcacttccgatttttatgacttggtggaggttctggagcggaacggctgggaggccagctcagacagcctgttggagttttctatgacaaataatgcttcggtggaggtcaacgatacgtatgggaacaatctgttctccgtcaattttgccaatatggagaatctggatacttccgccccttccataagctgttccgcaacattccagcaaggcgggcaaacctatcatttatttgctaatgccgcactggtagcggtggcgcaatcctatgacctcctgctgaagctcatcccctttatcaccgttgtgattctgttgatctccgttattggggcggtggtttgttctcggtactattccaagccactagtcagtatcagcaacgtggcgaaacggatgactactttggacatgacctggaagtgtgaagtcaaccgaaaagatgaaattggcattctggccgccagcctgaatgaaatgtcccaacgattgaacgacgcgatggatagcttaaaggcagcgaactggaagctacaaaaggacattgagagacaacgcgaacaggaaaagcagcgtgtggaattttttaccgctgtatcccatgagttgaaaacccccattgccatcatcaaggggcaactggagggcatgatctatcaggtgggcgaatacaaagaccgcgatacctacctgcgccggtgtatgaaaaccaccaatgagatggaagcactggtaaaagagattttatcggcggctcggatgggtggcagcgattttcatctggagcgtaccgatctggacatcagccaaatgctgcgaaaggtctgccagcagttccgtggccggatggaggataagcagatcgtgcttcgcatggacatccagccggaataccactgccagggagaccggcggctcatggagaaggtgtttaccaatgtaattggaaatgccgtggcctattcgccggtgggcacggtgattactgtcacccaaaaggacgaggtggtttccgtggagaataccggcgtccacattgccgaggaagatttggagcgtatcttcacgccattctaccgggtggacaagtcaagaaatcggaacagcggcggcagcggcctggggctgtatatcaccaagaccattctggaccaccacggaatcacccacagcatggtcaacacggaaaacggcgtgaagtttacggcgcttttgcggtaaaggtagtatgctgcgctttgccgggcaacttactgcccaaaaacaacttgtgctgcaagctgttcccggatagcaagtttacaatttattcttagaaaaaattaaaagacatgataaaataaactcaaggatgcaggaagtcttgctttaagttttttgttatcaattgttctaaattatcggtgcataaaattttattgtggtgctgatatgcgaatggtataatgtggatatgtagaaagtggcaaatttgaagttgtggagataaagtgaatggaatttagaaatttattgaatgtacaaaatcgtgatgagttacggcaatggcttttggaaaattataataaagaacctgaatgttgggtagttgtaaagcgtgggcgtcctgttgatgatgaaacattttggtatatagacgcagttgaagaagcaatgtgctttggttggattgacagcacaacaaagaaaatggataacggagttacagcacaaagattagctcctcgaagaaagggaagtttatggtctgaattaaacaaagaacgctgtcgcagaatggaacgattaggacgaatgacagatgccggtcgtgctgtgttgccggatatgagtgagaagggatttgtgattgataaagatattttgaatgcacttcaagcggacgcagagatttgggcgaattttcaaagttttccgccactttatcagcgtgtgagaattgatacaattcagattaagaaaaagcagtcggaactgttccagagtcgcttacagaagcttttagataacacaaaagcgggagttatgtatggcgaatggaatgataacggacgactgcttacagaatgacagcttccagtttgacaatttcatatccatgtacacaaagcagttacttttggtgctgttttattatcaaatctttattatcaaatcaaggctcattcaatcgtggtaaaatgagtgtttcaatatacttcaaaatgcttgaaagtatagtatttatgcagataatcaaaaattttctttaaatttgttggtagtattaaaatagcaaacagaatggaggaagatttgatgaaaaaattcttatcaacatttttagtaatgtgcattatcttatctgtgtcaggatgtgtttcttcaaacaataatgatgagaatggagagaaaatgaacgaggagcaagtaaaggagacgatcagtggaactcaagatgatatagaaaatcaaatcgatgctgcgatctccgagcaggaaagcaaccgtacagaaacaacaataaaaatagatttgactactgaaaattcagaaatttactatctaaatttaaaaaatgacgcaaaggcaaccttgcggtacacttatagtacggatgataaggaaggagcaattttaggatattataacgattctgatactgagcctaccacaatagaattgttgcctgcaacagaggaagcctataatgctatttggaaggaagaaagcgtagaacttgaaaagggagaaaataccttttatcttatcgaagatggaattcattgcaaaatgattttacaaatagaaggtattactgatgataacataatttatgccggcacagtcaaagaataatacatgttgtatcgcacgatctttgaggcactctactccaagcttttaaaactgaatgccagccgcctaccagcggcaccaccaagcaggaaatctttcagaggtttcctgttttttctttgcccagacgccgggagacagtacattaatttggggttgcaaaaatgccaactccacctaaaaaatatctcaactccaccagggctccaccttcatagtgtaccataagggtgttcccggcagacggggacaccaccggagcgggaaacagccccggcaagaaactacgttaggaggtacacaagtgaacccactgattttacccgaaggaaatgaggtggctcagacatgaacctgtgcaagcgggcctgcctgtattccatccgcaaaaagggcaagaccctcacgctgctggcgtttctgctggtcatggcaacgctgatgctgacctgcctttccatccaatcagccacagagacggccaacgccaatattaaaaaagccctgctgggctatttcaccatcaacgccaagacactggaaaacggcatcccggaggatacggtgagccagattcttgatgtggatggtttgagcggcaggtacaccctgcgctcctacacctacgctgcttattttgacgcagacgggaaccttctggagatcaacaccgagggtgctgcccaggtgccggagggttatgagaacgccggacgggtggtagccaactccaactcccaggaggacagctatttcaccgatggcggctttgagatggtggagggcgaccccatcaccaccgaaaccggcagccaggtgctgatccatgagaaattcgcccagcgcaacggcttgtctgtgggcgataccatgctgctggggaatgtggaggacaaaagccagaccatccccgtgacagtggccgggatcttcaccaacaccgaggaacaggattccatcggcatagccccatcctatgacctttacgacaacatcgtgtttaccgacctctctaccgcctctttcctactctacggcacggagggaaccaccaatgctcagtacggggatttctatgtgaacgacccggacgagctggagcgcattatgaccgatgtgcaggaactggatggcgtggattgggagagctgcaccttgactcgctatgacaacgactatcaaaacgccaaggaatccttggagggcttgcagaatatcgtctttatcgccattgcggtggtatccgtgatttgttttctggtgctggctctgttcctgacgctgcggctccgtgagcgaatccatgaaaccggcatctatctggccatgggcatttccaaaggctcggtgctgctgcaatacctgctggaagtgattcttgtggcggccattgccctgatggtttccttcggaaccagcacagccatttcccatcagatcgggagcagcctgctttctcaagtgacaagtgaaacctgtgaaacggtggacttgaccgggaaaagcgaagctgcggaagaacctgccgaagatttgggccttgccgagattgaggtggctgtttccgccgtggattacgccctggtgtgggcttttggcatggcgctttgtgtagcttctaccgtattggcagcctgtcccattatgaaaatgaagcccaaaagtatcttgtcgcagatgagctaaggaggttttaacaatgaaattaggaataagagcagttttatatactatccggaaatggaaaaagacgatgcttatattttgcttgcttctgtctattaccactctggtgctatcgggacttgctatcgctgatgcacaggaggaacaggctgaggaggtgcgcggaactaccggggccagctttaccgtagaaaggaatgtatctacgggaggttggtcaagtggaagtggcggctcttacagcacacaagaatatcttacagctgacatgatggaaaagattgctgaagtagatggtatcaagggctataatgcctctatccgtacaattctatgcttgtctgatagtaatgggaattggttggaacaaatgaaccctacgggtcatgcaatggttgattgtcaattttattcttatggttgtatcaattcagaataccactcccttttcctgtctggagcgttggttatgtgtgaggggagaggcattgatacatctattgataatggaattattattagtaaagagatggcagaaaagcatggtcttaaagttggcgatactattcaagctgtcaataatccattgtcaagtgataaaacaagagagttgaaaattatcggtttgtttgaaattgtggctgataaaacagatgagagaaataattataatgaggcgtcttattatgactatgcgaataatgcctttgttagtgaagcggcaatgaaagatttgttggaaaattatgcagatgtaggctatgctgctgcggacttctttgtgaccgacccaaaacagcttgaagttattattcagcaggtacaaaatattgattctatcaactggaacaattttcagattattgctaatgatgaggtgtatcaaaatatctccgcttccctttctaatactggtactttgattactacgcttatcattgtggtaacagttgtgagtatgatattgataattgtgattttgtcaatgtccatccgcggccggaaacgggaaacaggcattttgttggcagtgggtatcgtcaagcctgcggtgatcctccagtatgtgctggaaaccctgctgatcgcagtggtggccttcccactggcctacctctccggcaagcaggtggcgggaactttggggacgctgttcggcaaggcggctgagaatgtcatcgttacgccagagcactttatgttggtggccatcgtgggcggcattctgctggtggcggcggtgctggtgtccagtatctctactatgcggttaaagcccaaacagattttggctcagatggaataaggccatccgccctactaaaataacgaaatgaggtaatcactatgagtatcatggaaatcaagcaagtgggatattcctacgataataaaaagaaagtcttaaaggacatcaacgccgaaatggaacaaggcaaactctacgccatcctagggccttccggctgcggcaaaaccaccctgctctccctgatcggcggccttgacagccccggtagcggccagatttatttcgacgggcaggacattgccaagacgggcctttccgaccatcggaaaaaccatgtggcatttatcttccaggcgtacaacctgatcgactacttaacgccctctgagaatgtgtctctcacttccaagctgccgccactgcctattttggagcgtttggggctgacaaaggaagaatccaaacggaatgtactgaaactctccggagggcaacagcagcgggtggctatcgcccgcgctctggcaagtgaggccccggtgattctggcggatgaacctaccggcaatctggacgaggataccgcccaagacatcacggaaattctcaaagagagcgctcacaagatgaacaagtgtgtggtggtcgttacccactcgggcgagctggcaaaacaggccgatgtggtgttccggctgaaaaagggtgaactacaggtactggagtgcattcaggatggggccgtccagccccactcccgcagaaacaacgctccccctcagtgaaaggagggcacattgatggagatgggcagcaatccaatcacaaaaccctcgaaaaaaggaaatatcctttccgcagtttttgtgttcttgcggtggtactgcctgcttttccgggaagaaaatctgatcgggtaaaatggacagctctcgaatcagcttatagaggatgctgtagctgggcttttttgccttcgttcttataaatctctcggttacttcgaccttggcagccggggcttcgaccgtaatatccgcttttatacgggcaggcttgatgctttcgccgagtatttcatggtgattctgcacttttagttcacctctccttctgttttacggatttatgtcagttttataatggcatagcagttcaaattctggggagctaacggcacagagaaaagtgaactgaccagaatcgtatagacaactctgccaataaaaaacgaggttttggcagggtggtttgtcatgcacatcctcccatgttttggtctggggggatgcgctgggatccgatacgaagcagcgagtatgagtttataatataggccgcatatctcatggtacacagtcaaaaagctctctgtttttcagaggagctttatgtcttttgtggtgaactggtatgccgtaatttatacgaactaaaaggagacgcacttgctttatgggctgatgtcccgtcctgcaggtgcgtttttattctatataaagaaatggaaagaagccactttattacgttgtagggaaccgctgtgttgaggccacggatgaagtataccgggcctacatgcagggcggccggaaaatgcgttactttgagaacgatttgaaaaccgagcggttcgttctcggaaaggagggtcagatggtgcagattatccaccagccgcgaagattcttccgcaaaaatatgtaaataaggataaatcccagatctggctgtcctgctgggtcggggagtttactctttgagaaagcccttgtttttattttacaagtttacagttggtctattcctaaaagtggtcggtcatagtataattaacttaacgacaaattggaagttgtggaggtagcaagaatgaaaatgaaaaatcctatgctggtagtaacagatatagacaaatcagttgagttttacaaaaaggttttggggcttcatgtgattatggattttggagcaaataaaactttaacgggcggtttggctttgcagacagttgaaacatatcaaaattttatcgggaaaagcgatatttcttttggtggcaataactttgaaatttactttgaagaagataattttgatgaatttgcggataagctgaaagaatgtgaggttgaatatgtccaccctattgtagaacattcatggggacagcgtgttgttcgcttctatgacccagataaacacattatcgaagttggcgagaatatgaaaatagtatgcaagcgtttcttaaacagtggaatgacaccagaacaagtagcagaacgcatggacgtacctatgaaatttgtcaatgcttgcatgcgataaatatcagtttatcgagccgctctgacccgaactttcaaaactgaataccggccgcccaccggcggcaccactcagcaggaaatctttgaaaggtttcctgcttttcttatgccatttttacagagtatcaaaacgaccggtgaaacggcttgtatggctggagctgtggcgtgtatcgcaatgtcgtttacgttcgaaaatgaagatcttcaaaaaaattgttgtgcagtctctcaccttcaacggcaaatagggtgagaggttctttttgtgacctcacggcaccttgaaaattgcagacccattcattaagaacattcccgctgctttggcgtttcttccctgcgtgggatttcgccggcggaccgttgagaaaccggcaatacatgaaaacccggcaatacatcatttagacgccgcattggatataaaaggtaaaatacgccgtggagctgaaaaccgtagaagcgcttgtttgcgcagaccttgtcatccggcacacagcacacagcgggttccggcttacagagaatactccatggggtaggccagatagcggagcggatcgagctggtcgcaggttacatatccggcaggtgcggccagcaggcttggaatgcggttgaccacagtggcgcaggtatgctccactgtggcgggctttaccacgtgaaattccgtgttgggctcaccggtcagccgccagtcacacagatctccgtcgccgggtccgtaaaccttgccgattgtttcctcctcaatgataatgccctgcatggtctcaatggttacgaccgcggacatccctatgcagctgccggctggaatggttttgtccagcgtggcgctgtatacgtcgtggtccacggtataggggacatgcctctgcgcgatgcttttgacggtcagccccagcttgctgcaaagcgcttcgctggcattccacgcgtaagagggttcgaattccgcggggtgagcaatctgcgcttcaaattccgccttggttagcccgcagccgtgcgccttggcaagcgccgggccgtaatcctctacgttgtagctgtaggcgcccttgattttggtcagtttattgcagccgccggcgaccatggcgaccatattgatccagaaaatatcctgcatgccggagcccgtaatggtgcagccgttctttttggccagagcgtccagtcggttgatctgtgcggcggaggtggtccaagggtagacggcctcctcacaggtggtgataacgtggatgccgcgggcaacgcatttttccacctgctcgtaaatatccccgataaagctgaacagtgtgacgatggcgacatccgcgctgcatccgtccagcacctgatccgcgttgtcggaaatgattacaccggtttttaggccgagatccgcgtagtcgccgacatccagaccgaccaccttggggttcacatcgattgcgccgacgatttgagcgccgtgttcgtgcaggtagcgcagcgtatacttcgccatttttccgcatccgtattggataaccttgattttttccataatacagcctcctttgtgctgtttgatacaccagcggtgaaaggttttgtttttctttcacgcttagtgtaaacccttatgcgggagaagaatcgagtgaatttttggtaatttaacaaaaaatacttgacatataaggaaaaacatgttattctgtgcgcaaggaaacgggtttaggaaacaagtttcattagcgaaggagctattatgaatatacgggatattgccaagctggccggtgtttccccatcgaccgtttcaaaaatcttgaataaaaaggatcaagcgatcagcgcggaaacccgccggaaggttttgtctgtaatcaaggaaaatcattaccggccggcggcgccttctgcggcggctgcatttcccgcccggtccttcctattgggagcagtgctgcaaaagcgtccgggcatcgatatttttctggagagcctgctgctggcagcggcgcgggaggggtattccgtgcttacgcggtttgccgaaacggcggcggaagagcgcaggtgccttcaagctcttttggagtatcctctggaggggatcctgcgctgcggcataccggaaaacggcgaagagaatcaggcgcttgtgaagtctctcccttgctgtacggtgaattttgaccggccggccgcatccaaggcattggggcttgactatgcgcagctggggtatcaggcggcgatggagcttgtggagcaggggcataatcgaatattctgcatggttcacggcgatacgccaaacgaaatgcagtttgtagagggctgccggaagtgcctgcatgtgaagggctctcctttggcggagctgcaaacctgccgctacagccgggagggactggagggcaagctgctcttggaaaataccggcgcggtatgctttgacacggccttggcggaaaaggtttatgaaggggcggagcggaaaaaccggagaatcccccggtatctttctgtggtcagcctctcggaaaatgagcccggcgggtttttgcccagacttactgtgttgcttccgccttttgctaagctggcggaagcggcctgccgcggcctgattgcccgcatcgaaggcgctgagacacagaagaaaaacgaaggacctctttgcgggcagctgtatcggggagacagtgtggcgatgccattgagtgcgaagagcaagaaaattgttgtggtaggccccatcaatatggataccaccatttatttgaaagattttccgcaggtagggcgctctgctctcaccgattccagattgatcagcccgggcgggaaggggcttaaccaagccataggcgtggtcaagctggaggggatcgtctccctgatcggcaaggtagggcgggactatgagggaagcgagatttgggattacctccattctcacggtgtggacttaggctgtgtccgccgcacctcccgggatgccacgggacacgcctatatttgtgtgcagaaggatggagaaagcggcatcatggtgtataagggcgcgaatgaccttctaaccccgcaggaagtgatggagcatgaagcggcgtttgacggggcggcctattgcctgcttcagacggaattgaatatagaaatcgtccggacggtggtgcggctggcgcacaggaagggggtgaagatcctgctgaaaccagccgctgtggacgaactggacgatgaaatatttgaaaagacagacatttttatgcccaacgaaaaggaaagcgctcggctttgcccgggcagggatacctgcgcgggtcaagcggaatattttctggagaagggcgtgggacaggtgattatcaccagaggcggaaaaggctgctattggagcgacggaagccggtgccagacttttccggcggagaaatttgacgtgatcgataccacgggagcggcggatgcctttgcttcggccttggccgtgcttttggcaaagggcatggagatccgcgaggcgatccggcgggcgacgattgcggcaggcttttccaccaccaaatggggcacacctgaatcgctgatcgactgggataccttggagtttctttcttctgcgaggaaatgaatgcctgccggtgtccatgtcatttaacccgacgattgatacgaggaggtaaagtgatgaaaaaaacagtatccttatttcttgctctcattctgatgagcaccgtgttgtttggctgtgcagacggcggcggaagcagcgctgctgccggtaaggacggtgcgtctgcggcggaaggcggagagcccgtcaccattgaagtcgctgtaagcggcagcgcgcaggagctggagatccaccagcaaaaatttgatctgtatacacaggagcatcccaatgtgaccattaagcccgtagacattggtacagagcgcttccagaagctgatggccctcattggttccggtacggccccggatattatctacatcaacgaatggtgctattccttggcgtaccggaacgtgctgatgcctttggatcctttcatggagagcgacgaagcgtttgatctgtcctattaccccgaatctctgctgcttcctctgcgctatgaggatcagttgtttgccctgcctcaggaggtttctccttatgtgatgtattacaataaggatatgttcaatgccgccggggtggagctgccgacagatgattggaccatggaggatttttacgctgccgccaaggcgctgacaaacgcggaggaaaaggtatacggctatcgtcatcccggcgcatgggcggaccagatcctaaactggttcagtctgtccggcgttgagtacgataccagcggcaccgaggtaaaggggctggataccccggaggccctagaggcgctgcagtttttgtacgacttggttgtggtagaccagctttcgcccaatccggcctcgttgaccgccatgggcaaaagcgccgacgccatgttccgcaatcagtcggtggcgatggaggccgccggcctctggatgcttccacagtataaggcggacgcccttccctttgagtgggatgtggttcgtatgcccaagggggaaacgcagaacgtgaaggcgggcatcctgaactggggcatttccgctgatacggagcacccggaggaaacgtgggagcttttgaagttcctcgcgggccctgaggggatgcgcattgtggccgaaagcaacatggccctgcccgctgctgcggatgacgccgcaaaccagattgttttggatacgaaatttccggagaatgtgaaggcgtttgtggattctgttccggatgtggatatgaccgaccagctctctatttatcgcacagaggtaaacaccaagatgcaggagctcgtggataaaatgctgatcggtgagagcacgccggaagaaacccaacaggcgctcatcaaggaaatcaacgcgattttggccgggtaacagcagagcagccggatcggtgaaagaagaagggggatttttgcgcaggttaaaaatctccctttcttttaaaaaggtgcaagcggagcttctatccgcaatactcgaaatttcgaattgaggtgattggaaatggcagcgcagacatccgaaaaaaagcgaaagccaattggagcgaacgaaaccttttgggggtatttgtttctgatgccggtgatcgtcggcttcatcgtatttaccgtttttcccgttgtcatgtcattttactacagcctgacaaactatgacggagttaccccgccgaaatttgttggggtacagaactacatcgatttgtttaccaacggggatttcggcgaggccctgtggcatacggtttactttacgatcggcacggttccgctgggaaccctgctggctattctggtggcggtatttctgaaccagaaaattcgtggcgccaatctgtataagactgccttttttattcctgtcatcgtgtcttacacctcgattgccatggtgtggcaatggctgtacaacgacgatttcggcttgattaactccgctttgaacgccattggcctgccgagcgtgccgtggctgacgagcagcgcatgggctatgccttcggttattattatgagcatctggaagaatctgggctttaattccgtgattctgctggcaggggtgcagggggtatcctccgccgtgtacgaggcggcggacatcgacggagccaacgtggtgcagaagttttttcacatcaccctgcccatgctcaagcctacgatcatgtttgtgatgattatcagcatgatcaattcctttcaggccttcgaccaaatctacattatgaccaagggcggccccggaaccgctacgcaggtggtcagctacttggtatacatgaacgcttttcagtacttcaagcagggctatgcttcggcgatggcctacattctgttcatcattattttcgtggccagcatcattcagctaaaggtcagcgaaaaggacagcctgtgaggagggcggaaaaatggaaaatactgcagtgcgcatgcgcaggggaaaggggaaaaagctggtttttcggatgctcacccatacggtgctgattctttgctccatcaccatgctgattccctttctgtggatggtttccagctcgctgaaaagcatggacgagctgtttgccgtgccgcctgtatggattcccgcgcatatcgcatgggaaaactatgtgtacatgttcgagcaggcgccttggattacttattttgtgaatacagccgttataaccgtgtgtacgattctgggccagctggttacctgctctatggcggcctacgcctttgcccggcttaaatttaaggggcgcgacgccatcttcatcatctatttggggacaatgatgatcccgtttcaggtcgtgatgatcccccagttccagatcatcaagacgctggggctcatcgacaacatttggtctttaatcgttatcggtatttttaacgctttcggtacctttctgctgcgccagttctttctcacgattcccaaggagctggaggaggccgccaagattgacggatgcagctaccccagaattttctgggagatcatcctcaagaattccaagccggccctgatgaccttggtgatttttacctttatgaacacgtggaacgatttcctgcggcccttgatttttattaacgatcaggagaactggacgctgtctatggggctggccaaatttcagggaacctacgtgacccagtggaatcagatgatggccggcgccctgatcaccatgctgcctattctggtggtatacatctttgcgcagaagtattttgtgcagggaattgtcatgagcggcattaaagattgaacaaagcagaaggaaggagtggtatatatgcaaatcccaaagaattattttgaaaaggtttatgccggctggctgggaaaggtcgttggcatccggctgggcgcggccgttgagggctggagctaccagcgcatacagaaagtgttcggcgagctgtgggactaccccgttcagtacaagaattttgccgccgatgacgacagcaacggcccggtctttttcatccgcgccctagaggactgcgaggacgtgaaaaaattctctgcgcaggatgtggcggaagcgctgctgaactatgccccttatgagcacggctttttctggtgggggggatacggcacttcgacggagcacacggcctacctgaacctgcggtccggcattcccgcgccccgcagcggcagtgtggagcagaatggctccactatggcggagcagatcggcgggcagatttttatcgacccttggggtctggtttctcccggcaatccggagcaggccgctgccttggcggaaaaggcggccagcgttacgcacggaggcaacggcatatacggcggcgtttacgtcgcttgctgcatcagtctggcctttgtggaaaaggatattcgcgctgtactggataaggctctggcctatatcccggaggactgcgagtatgcaagggtcgtcaaagctgtgatggggtaccatgaccggcaccccgaaaactggagggactgcttccggtatatctacgagaatttcggctatgacaaatatcccggaaactgccatattattccgaacgccgccgtgatggttctttccatgctctatggtcacggagattacggccaaacaatcaatatctgcaatatgtgcggctgggatacggactgcaatgtaggcaacgtgggctgcattatgggcgtactttgcgggttggaggggattgactttgacaagtgggcgaggcccatccatgatttcctcgcctgctccagcgtggttccgtccctcaacgcgatggacctgccctacggcgccgcctattttgccaagatggcttacctgctttccgaggaggaggcgcccgggccgtggaaggatatttttgacggccgtttagaaagctgccattttgagtttccaaaaagcacccacgccattcggttccggtcggagggcgctctgtgccatattcgcaataccgatgagcaggcccgtaccggccgccgctccttaaaaatcactgccggaaatgccgtttccggaacagagcactgcttttataagcagacgtactatcaggcgcgggacttcagcgattcccggtacgacccctgcttctcgcctctggcgtaccccgggcagacggttcatctcagcgtgatgcccctgccctgtgaaaatatgcgggctaccgcgcagatttatgtgaaggatggagctaccggcgagcttatccgcggggatagggtggcggcggacggcgcttggcacgatttgaccctcgttatccccggcgggagaaccggatttattgaggaggtgggcgttctcctctgcggcgtggccgcgggattcgcctccgaggatctgacggcctatctggatgatctgtatgtggacggaacccccgattaccggctggacttctctcaggagaaaatggatgtatggaacggccttcatcaggagatcccccagttcgccaagctgaaaggccattcttatttggacggcgcttggctcagcctgtcctgctctgattttgctgagatgtatacgggccatcatatgtggagcgactacaccctttccgctacgcttaagcccctgaccggggcggaagcctatttgaatgtgcgggtgcagggcgccatgcgctcttacgccgcgggattttccggcccggggaaggtggccctgcggaagaatttccacggatacaccaccctttgtgaagcggattttccgtgggagaaggggagggagtaccgcgtggaggtgacggcccggggcggaaggctgactctggctgtagatgggaaagcgcttctttcctatgaagatgcgcggcctctgcgcagcggctgtgccggattgtctgtaatggaaggaagccactgcctgtaccgggatataacggtttccggaaggagcccgcaggacatatgaaaaagatcttagtcatcggaagcatgaatatggattttgtcacggatattccccatatgccggcggtgggcgagacggttttggcacaagggctggattttgttcccgggggaaaaggcggcaatcaggcgtatgctatgggcagactgggcgggcgcgtttccatgctgggcagcgttgggaatgacacctatggagagaagctctgtgccaacttggcatccgccggggtggatgtttcctgtgtgcgccgcgcgcaggcggtatccaccggtatggctgtgatcggcgtcaccccccaaggggataacagcattattgttctgcccggcgccaaccgtgcagtggaccgggaataccttcaggaacatcaagatcggctgaaggattgtgacattgtggcgctgcaattagaaattccgctggatgcggtagtctttgcggctgaggaggccaagcgcttgggaaagactgtggtattggaccctgcccctgctgtgcccgacctgccggaggatctgtacccttgtctggacctcatcaagcccaacgagacggagctgtctgttctgacgggctgcccgcaagaccccggcggaatgagaaaaggcgcccgaatcctccgggaaaaaggcgtaaagaacgtattggtcactttggggggagagggatcgtatctgctgcaggaggacggcacggagcggtacttcccggcggataaaaccgtgaaggtagtggatacaacggcggccggggacagttatatggcgggcctgtgcgtgggaatggcacaaggccagtctttggagaaggccgcggagctggccacggcagtctccaatatcgtggtgacgcgccggggagcgcagacttccatccctactatggatgaggtgctgggcaaagcgggctcatagggcggccgccctgcgtcgtgaattgcgggccgcgcagccttttcctgtgtgggaagggccggcggggcgcagtttcggccgtttttaatgccttttactgtcttatattccggtatgccaaagaggcggccggctcgtgtgagccggccgcttcaatttttgcgttcgtttggtatttaaagcattccttcaatttttcggtacagcgcggctacggcgcttcgcccttgcgctcgtccttgggggagacgcccatcgttttgcggtatacctgcgagaagtatgagtaattgtcgtagccgagcttggaggcgatcacgttcaccggcaaagcggtggttcgcagcaggattcgggcggactgcattttccggccgatgatgtattccttcagggcggtgcccgtctcgtttttaaacatgcgggagagatagtccggattcaggaaaaagtgggtggcgatatcggcgatgctcaagggctggttcatatggtcctccacgtacttgttcaccttttccacgatgcgcttgtcgtggcccgccggcatgtcggcggcgggaaagcatgcggccagagccttgacagctgttttcatctcctgcagggactgggcgccggcccctttctcgagcaggcccacgattttgtgcggattcagcgaaagcgcacgcgcggcgttgagcaccgactgctggaattgcatccaaaagccgcgcagcacctcctgattgacggcgccgcgcttcgcgaggagatccagataaccgcagacctcgtcgctggcagactccccctgtccatccgtgagcagggactcccatcggcgaagctgcatgacgtcgaggaatttatcgatatacacgcggtccagccggcgggcagggcggaaaataccgctttccagcaggacattgttgcgcttggcgtcctgcaaaagcgaggagagtccgtccgttttattcagcggggtgacgggcgtggcgtaaaaggcgaaatcgcagctcaggtgatcggtgatcgcctcgtacacctcgtttaagggcgtcagcgtgcggtcggggttttgaaagtgcccgcccggcgcgtagatgaaccatcccagcgaggcgtggtcgatggagaaactcagcgcgccgtactgcggcggcgcgtaaaattccgtcatcatgttgttcagggcatagacccagtcgtgtgtggaccagatttcggcgtgccagcgcaggaggtggccccagatgaagaagcattcgctgtcctcgaaaagctcctgcccgagctggcgcagcacggactgcagcgtggggatagccagcggcttgccgttgacccagtcgctgaacaggttttgaaacagcccggcggcgtggttcttggccaccgcgccaaactgctcgagctgtttttcgatgccgctcgtcttggcgcgtgcgatggctttcgagacggtggcctgaatttcgtcgtagcgggcgggctgtaaaatatagtcgaagcagttgagctgtatggcctccttggcgtagagaaaatccgcgtgcgaggtcaggaacacgcagatgaaatccattccccggtttctggcccaccgcagcagagagagcccgttttcgccgggcatctcgatgtcgcacagcatgatgtccaccggctcctgtctcaaaatctccttggcctgcgcggcgttgtccgccgttttgatcgaggtgatgcccagattattccaatcgaggccggagatcaggccgctcaaaatgctgatttggtcgtccaccagaagtacagtcaaccttgtttgccttctttcgtttcgtttttcaggggcaggaacagctctacgcttgccctgtccgaaaggttcataaagcacagcgcggcctcctcgcggtataaaaggcgcaggcgccggcgcacgttggcgatgccgatgtgcttgctgctttttttctcttcttccggggtgttcagctgccggagctgctcctcgctgaagccgccgccgttatcggtgatcgtgatgttcaggtagcccttgtcgtcgccctgcagcgccgtgcactggatgacgatctccagcggggaatcgatgcgcttcgaatgtttgatggcattttccacgaaggtcagaatgctcagaggcggtacgagcgccttggaggcggccgtatccacatcaatccgcagcttcggcggcagcttggtgccgatctgctgcaggcggatgtagcttcccaccgaattcagctctgtttcgagcgggatgagttgtgagccgtctttgaaaatgttgcggaagtaggccgaaagatccaaggtgagcgcctgaatgggggcgaacttccgctcgcccgcaagggaatagatcatgctcaggcagttgaggaaaaaatgaggccggatctgtaattgcaggcactgcatctgcgtgcgctgtatttccagctcctgttcataggagttgattttctgtgccgagatggtgtccagcattgcgttgacggtctcaaacgtctcgcgcacctcctcgatgcgtgaatctttcggcatgcgctcgtcggtatggcccgcctgaatggcctgcatggcgccggtcattttcgtcagggggtccaaaagcagacggcgcaggaccagccagcacaggggaatagccagaagcaggcaggtcgtcacgcagagcagaacgatctgcacgggcgtgagcgtttggagaaacggctctgccgggctcgcgtagtacacccgcccgcctatgctgctgagagggagggagaaaagctggtaataccggccgtcctctgcggaaatggcgatcccctccgtttggggaaagacctgcgccgaaaagggctggggcaggtagggctcgttttccggcgtggtatagaacacgcgctcctgctcggagaggccgggatagctctgccgcgccgggtcgatcagggcggcgaaaaccgtgccgcgccgcacgtacaggtagagcagcacctgcctgtcgccgagaggcacctcctgccatgtgccggggcggtcgcctgccgcggcggcggatttcaccgtttcccgcagcacggaaagctcggactgcaggtaatcgccgctgtagatgagccggttgtaatcgaatggctgcgagtaaataaaaaaggcgctcaacatctcctgcgtctgcaaaaacgcctcgcattgatagccgatggcctgcgataccagataggcctccgttttgcttttggcaaagacgatctcctcgaaattcgtctgatcggtagtgatggtcgctgtgaaatactccgcttggctcacagcctcgtcaaaggcgtcccggtaaagggagagcgtgttctcccgggcggtctgcagcacgtcgagctgctgcttcaccgcataccagtcgaacagcaccaccgcgaaaaacaacggaagcacaataatggacaaggagagcagggcaaggcggcggatggaccacgccgtccccggcttttttccacgttccaaatcgaggccccctttgtcacggttcacaatatattaccaccgggcatcgtattcttgtatgtactgcacgcgataccctttgtgcaaaacttataaaaaagaaataggaaaagccgttgtggtggcattatatcataatgtttatggaaaaagatagtcgatgtaggaaagttgacagaagaaagtcggattttcaacactttcgaccgtcattatcactaaagccacgcgttattgacatttttgcacggatttttgatagaaactttcaacgtgattatatataatgtagataatataccttgtaaaaaggtgaaatgagaggagaaaattccatgaagcacaccatgaaacggctgagcgcggctctgctcgccgccgtgctggggctcacactgggcgcctgcggcggaaccgacaccgatgccggaagcaccggcacaagcaccggagagagcgccggcgcctcgagcaccggcggcagcgacggagaagtcgtcaccctgaaggtttggggctttacgaacgccgcgccgaataccgagcagatcgacgcggtggcggccgcagccagcgagatcacccgtgaggagctcggcgtggagatcgaaatgacccgcaacttcgacgcggaaaaggcgaacctcgccatggcctccggcgaggagtgggacctgttcaatatccacagtttctccggcggcgttcaggcgctggcgacgaacggctatgccacgcccctgaacgatctgctggccgagtacggcaaggacattcttgcgctgcagcccgaggagatccgcgcgggctccatgattgacggcgttttgtacgcgataccgaacaatgcggacagtgcccgtgccgccggttttgcgatgaacaaggcggtgctcgacgagctgggcatcgatcccgagacgatcaagacatgggacgatgtgcacgacgtgctggtacaggtgaaggaagcccggcccgacctgtacccgctggtgccctcgtggtcgaacggcggtatgcaggaggtcatcccctaccacaattttgcgggcggcgctgttctggaggatgtgtttaccgacagtaccgaggtggtgaacctgtatgcgaccgatgcctacagagagttctgcgagcggatgtaccagtggaaccaagagggcctcatcatgccggacgcgaccaccacgaccgacaacatgctgatgcagaccgtcggctttgcggactacgagaatatcaagcccggcaaggagatcgagatcaagaaatcgtggggcatcgacgccgttctgatcgagctgacgccgccctacatgcagaacgcgggcggaggctggtgcattcccgaatccagccggcacaaggagctcgccatgcagctttggaacctgatgtggacgaacgaggagctttccaacatcctgatcaacggcgtggagggcacgcactgggagtggaaggacgacagccatgaggtgattgtcgcacccgagggcatcgacacaaccggctcctccggctatgaatctctggactgggcgtggccgaactgccgcatcaccgcggtttgggacggcggcgacccagaccagtgggacaagctccagacattctgcgacgaagcccgcatcagccctgcgaacggttttgtctttgatacaacgcccgtgatgaacgaggtcacggcctgcaacaacgtggtcacgaagtataacgtcggcctgcgctggggcgagctggatcccgacgagacgatccctgcctttaacgcagagctcgaggcctccggcatcaacgccatcatcgaggagtgccagtctcagctggatgcttatcttgcatctaaataacggatctttcagaggaagcgggccgggagtttcccacggcccgcttctttctgaaaatttttgcgaggaggaaccgccgcatggccccaaaatttaaaaaactcgcccgcttctggcccttgtacctgatgctgctgcccggcaccgcgtaccttgtcatcaacaattacattccgatgacgggtatcgtggtggccttcaagcagtataacctgcgggacggcttgtatttcagcccgaatgtcgggctcaagaacttcgagttcctttttaaaacgaacgacgcctggctgatcacgcgcaacaccattttgtacaacctcgtgttcatcgtgctcggcgttgtgctggcgatcaccgtcgcgatcattttgaacgagatccgcatcgacgccgcgaagcaggcctaccagacggtgatcctgatcccgcacctgatttccatggttgtggtgagctatctggcctttgcctttttgagcgacggcaacggttttttgaataaatcggttctgccgcttctcggcatggagcccgtaagctggtacaacgcgccgcagtattggccgttcattctggttctcatcaatgtttggaagggcgtcggttacagctgcatcttgtactatgcgacgatctgcggcatcgaccacagtctgtacgaggccgcggtggtagacggcgccaaccgctggcagcagatttggaacatcacgctgccgtgcctgaaatccaccatcatcattttgacgctgatgaatatcggcaacattttccgcaccgatttcggcctgttctatcaggtgccgatgaattccggccctttgcagaacgtgacgagcaccatcgatacatacgtgtaccgcggcctgatgcagacgaacaacatcggcatgtcctcggcggccggcgtatatcagtccgtcgtcggctttgtccttgtgatttccgcgaatctcattgtccgcaggctggataaatccagcgcgctgttctgaggaagggggagaaaccatggtagaaaaaaacaaaggctttcaggtattcgcccatgcggtgatgatcttcatctcggcttgcagcgttgcgccctttattttgctgctgtcctcctcactgacggatgacgcggcgctttcggtttacgggtattcttttttcccgccggaattcagcactgaagcgtacagctacctgttcacgagctcctcggcgattgtaaacgcctacggcatctccgccgccgtcacgatctgcggtacgctctgcaacctgattttgacgacgctgtatgcgtacccgctttccagaaaagacctgcccggacggaacttcttcgcgttcttcctgttcttcacgatgctgttttccggcggcctcgtgccctcctacatcatgtggacgcagaccttccatatccgaaacagcattttcgcgctgttggtgcccaatctgctgatgggcgcgttcaacgtcattatgatgcgcacgtatttcaccgcgaatattcccgatgccgtgatcgaggcggcgcgcatcgacggtgccagcgagttccgcattctggcgggcatcgtaattccaatggcggcgccgattctcgcgacgctctgcctgctggtcggtctggcctactggaacgactggcagaacggcctttattacctaacggacaacaagctgttcagcattcaggtgctgctgcaaaacatccagcgaagtctcgacgcgctgaagcagagcgcacaggccggcggcagtgtgaacgtcagcacggcagatctgccctcaaattccgtgcgcatggcaatcacggtcatgggcgtgctgccgatcatgatcgtctatccgtttttgcagcggttctttgtaaagggcattgccatcggcgccgtgaagggctgaggcggtgtaccgcgctttccgtaaaacgggcggcggtgcgtttcggcgtggtgccgtccgctttcgattcctacccaaaataaaggaggcgttgtgatgcagattccaaccctatcggtcaccgagaataaggcgaccttgctttcggacggcaagccgtttctggtgcttgccggtgaagcccacaattcgagcagttccagcctcgaatacatgcgggagagcgtgtggccctatctgcggcccatgcacctgaatacgctcgtcgtcgcggtcacgtgggagcttttggagcccgcgcccggccggttcgacttttccctgccggacgggctgatccggcaggccgaggcggagggggtgaagctggtttttctgtggttcggcctgtggaaaaacggcatgagcacctatgtgcccgaatgggtcaagcaggaccgcaaaacctatttcgccatgcgaaaccgcagcgggaagcctgtaaatgcggtctcgccgctgtgtggggccggtgttgagcgcgacgcggccgcctttgcggcgctgatggcgcacctgcgagacttcgacgtgaaccgcacggtgctgatggtgcaggtggaaaatgagatggggcttctgggcgactgccgcgatttcagcccagccgccgaacaggcgtatgccgcggcgctgcccgatgacgcagcggatttctgcggggcgcgcggcacatgggacgaagtgttcggcagcgaagcgccggagctttttatgacgtaccactacgcgaaagccacacagcagatcgccgcggccggcaaagcggcctatcccattccgctctatgtcaacgcgtggctggagcagcatccatggacgccgggcacgtatccggtcggcggccccatcgcccgccatatggactggtggaagaaatttgcgcctgccgtcgatttcctgtctccggacatctacctgccggattttgagactgtctgccgggaatacgcggcgccgggcaacccgctgttcattcccgaggcgcgtccctcgcaggactccgcctcgaacgtattcgccgccatcggaaaattcggcgcgctgggcttctcgccctttgcgatcgagaccgtcggccgggagggcgtgcctcccgatccgtcgcttctgggcgggctgaacatcatggcggaggcgttcaaccactaccgcgccggggagtatcttgcccagagctacgcgctgctcggcgggatggcggagctgctctgcaagtaccgctgcacgccgcacatgacgggctttactcgcggaaaggaccaagcgggcacgctggtccaatttgaaaaatacgatttctgcatcgattatatgatgaattcggctgaatctccgaagggcggcggcctcattatcgagctttccgaggatgagttcctgctctgcgggctgaactaccgcgtgacgccgcagccgaagaacgacgacccgagccatgtggactacatttcaatcaccgaggggcgctatgaaaacaacgaatggatccccggccgccggctgaacggcgacgagctccgcatcctgttccgtgaaaagccgtccgtcctgcactgccgcctgatgcgcttccggtgacggctccgagatgccgccgcacgcggtgggggggcatctgtgttaggagacacaaggagagaagcggcagaaagcgcttattccatacacggttggaattagcagtggacaaaaaacctgttgtgcgtgataatacttatagagaatgtacgatgcaggccctttgcgccaacgtctgtgcatgcaatttttggaggtgacgccatgcaatactactgcaatccgctgaatgttccgtatcactaccagtttttgaaggaccgccgcgcggcggacggcgcgaagttcgtcaaccgcgaggccgccgacccctcggtggtgctctttcagggaaaatactatcttttcgcctcgatgaacggctccgtctgggtgtcggaggatctcgcccgctgggagagccgccggctgcccgaaaacctgcccatctacgactatgccccggatgtccgcgtcgtcggcggctggctgtatttctccgcctccaagcggggggagatctgcaatttctaccgcacgaaggaccccgtcaacggcccttatgaggagatcaccggcacgttcgatttctgggatcccaacctgtttctggacgacgatggccgcctgtacttctactggggctgctccaatgtcaccccgctctggggcgtggagctggaccgggagacgatgaagcccaaaaccgagcgcatcgagctgatttcaggcgatcctttccacaaggggtacgagcggttcggcgaggacaactctgagcagccgaaaacggaggcggaggtcgaggcgctgttcacggcctttctgaaggaaaaaagtcttgcggcggatgacattccggcctcgtaccggaagatgctgcgcgggatgttctccggcatgccctttatcgagggcgcgtggatgacgaagcacggcggccggtactacctgcaatacgcctgtcccggcacggaattcaacgtttatgccgacggcgtttatgtgtcggaaagcccgctcgggccgttcgccccggcagagaacaacccgttttccatgaagcccggcggctttatgcgcggggcgggccacggttccaccgtggaggacaagaacggcgcgtggtggcatgcggcgacgatgcagatcagcatgaaccattcctttgagcgccgcgtcggcctgtggcgcgccgggtttgaccgggacggcgagctgttctgcaaccagcgctacggcgattggccggtcagtatggagcgcctaatggcggacccgtgggcggagccggagtggtatctgctcagctatggaaaaagcacggcagcctcctcctgtgcgccgggcatggattccgcccgcgcggcggacgaaaacgcgcagacgtggtggaaggccggcagcgccgaatccggcgcgtggctttcgctcgatctgggcgaggtgatggacgtccgcgccgtgcagatcaactttgccgacgacagggaaagcggcatcgcttggccgccgcaggctgaggcagccgcagagcgctggatcgacctcgagcagcaggccacccggtggctgctcgagggctccgccgacggcgaaacgtggatgaccgtggaggataaacgtgatgcggacaccgatttgagccacgaccttgtcgtgcgggaaaacggcatcaggctccggcatctgcgcctcacggtattcgcggtgccctacggcgcggcgccctgcgtctccggcctgcgcgtctttggcaggggaaacggggagaggccgcaggcggcaagggccgcggcgaagcgcataggccccatggatttcaccgtatcggttccgcgcgtgcccggcgccgccggcttcaacgtgctttggggccaccggccggacaagctctaccacagctacatgctgatgggcgacagcgtttcggaaaaacggatcggcgcgctggtggcgggccagacgtattacttccgcgtggacgcattcaatgagaacggcatcacggcgggcgaggtcgagcggctcggcgggtaaaagcgccgcgcattttctcaccggaaaatttcaacagcccggcaagaagacggccggagcatccccgcggatgttccggccgctttctgcggtttttggggcgcttttgagccgccccatgccgtacggaaaacagaaagcgccgcactgccggtctgcaaatcggcggtgcggcgctttgtatcgataaaagggccgatgcagtttctttctgcaccggcccttgtttcggttttttcgtaaaggatatgggatttatgcgggacagcgcccacgtgcccggtcagatctcgtcgatcaccagcgtggaaagcgtccgcgccgggaaggagacgcggatgaccttgccgcggatgcgcagcgcatacgcgcggtcctcattctccttgttgagcgcgacaacggcgagcgagccgtcggggttcacggcggcggtgatctctgcgtggtcgtcacaccggctgaagccggcgcgctttgcgcccggctggatgtagcgggagaaatggccgacgtagtcgaagatcaggtcggtgcggaaggtgccgtcgtcgttgacgatcatgccggcggcaaagccgaagtccacgtgccgcgggccgccgtccttatccacgcagaagttccagtcgaaccacgtctccatgccggcgttcagattgccgatgatgtcgtgcgcgtagttcaccgcgtcgtcctgctcgacggtttccggcgttttatccgtgccaaagccggcaaagccgacgcggccgggctggtgcagggggcagcactcggagaacatcattttcagtccggggtactgttccgccgtcattttcacggcctcaaagtggtcgccggaataccagtggaaagcgacgccctcgatcatctcgcgggtagtgtcgtccagcatgtcgcgggtccactcgaaaacgcgctccttgttgtgatcccagatgtacaggccgattttcccgatgagtccggccgctttcatggcggggtacaggtggtcgcgcaggaaaatcttctgatcctgcgccgtccagacgcagctgtcccagttggtcgcggcgatcgattcattttgcagcgtcatcatcgtgacggggacgccctcattcagataggcttcggccagcttgacgaggtatctggcccagtcgctgtaatgctcgggcttaaggctgccgccgttgcagcgctgcggcttggtgtagtctaccttgtcgggcatgccgggcagcgcgccgtacacctttttctcgttcttcggcggtgcgggcggggttttccactgccagggcggggaccacgggctgagcagaacggagaccggccgcttgcacagggcgagcgcctctttcaatgcgggcagaatgtatttgaagttgcgggtcatgtcaaaggtcttgaattccgggtccgcgatggggtcggccacagcctgatactcctcgagcgagtaatcgcagctgtccagcggcacgcggatcaaagcgaggttgttgcccttttcggtaaagagcagctccatcgccttcttgtggttttccggggtgagcgtggagagcaggtaggcgctcgtgtccgtcatggcgccgccgaagcccgttatggtttggtaggtgatttccggatacaggttgatgacgccggattccagatggcgcggctcgtcggcctccagcgtgacgggcagatccctttccacgggataaccgatgccgtttgcggcaaaggtggtgatctgtctgcatttcatggtgatgctcattccttccttttgattttccggccgtgcggaggagcggatcctgcgcggctgctgcgttttttacagaaatagtataccatatagaggtgaatttgtcaaaaagaatgattgcggacgcgctagggcaaggctatgcgggaaggacgtgccggcgggccggcttcgaacctttagggtgctttggcggcgcggcgcacagcgggggccaaacggctccgctctccgaaatgcgggcggtttttctttacaatgcgtctggccgttgttataatgaagaaaaaggagggggaacggtggagcagggacagatcgtaaaggggtatcggaacgacgatgcgctgcgcggcagctttgaccgtcttgcgcggcggacctttgatctcgcgtttgaggactggtatcaaaacggcttttggggcgatgattatatcccgtattcggtcgtgatcgacggcgcggtcgcggcgaacgtctcagtgaaccgaacggacttcgtcctcggcggcgagacaaagcactttatccagcttggcaccgtgatgacggacgagcggtaccggaaccgtgggctgatccgccgcctgatggcggagatcgaccgggattttgcggggcgggcggacggcgtctacctgtttgccaacgacagcgtgctgaatttttacccgaaattcggatttcgccgggcggtagagctcgaatatacaaaggcggtggaaaccgccggcgcagcttttgcagagccggtgccgatgcgcgatgccgcggcgtgggcggcgcttaccggggcgattcaggcgagcgcgccgtgcggccggttttcgctcagcggcaacaccggcctgccgctcttttacgtctcgaagttcatgcaggactgcgtctgccgcatcggcgatgatgcgtatgcggtggccgagcaggagggcgggacgctgtgtctgcacgcggtctatgcgccggcgccgcccgatctggacgcggtcgtccgcgcgttcggcgcaggcgtgcggcaggtgcggctcggttttacgccgcagagcagcgcaggatggacgccgcacgcgcgccgtgaagcggatacgacgctgtttgtccgcggcgccggcttcgatgattttgaacgcaggggactgatgtttccggtgctggcgcacgcctgaggcggattgaggccggtgcggggccgtgaaacagatgggaggaaaggccggatgaaaaagggaatttttctcggagacaaaaaacagatcgattccgtttatcccgaggcgctgcgcgcggcgctcggtgagagctgcgcgctggaaagcgcggtgttcacgaaagaggcggttctgcgcgacccggcgcgttttgcagatacggactatattttttcaacatggggtatgccggcctttgcggagcaggagatcgccgcctgcttcccgcggctccgcgccgtgttctacgcggcgggcacggtgcaggcgttcgctcggccgttcctttcgcgcggcgtgcaggtgttcagcgcatgggcggcgaacgccgtgccggtcgccgaatatactgcggcgcagatcacgcttgcgaacaagggattttaccagaaccagcgcttatatcaccgcggagagcctgcacgcgccgcggcgcattttcgcgggcatgcggggaactgccgcgtaaaaaccggcctgatcggcgcggggatgatcggctcgatggtggccgagcggcttcgtgcgctcgagacggaggtgctggtgtttgatccgtttttgcctgcggcgcgcgccgccgcgctgcatgtgcgtgccgtttcgcttgaaacgctcttcacggaatgcacggttgtctccaaccatctcgcaaacaatgcgcagacgcagggcatgctccgctacgcgctgttttcaaggctgccgccgtatgcgacgtttctcaatacggggcgcggcgcgcaggttgtggagccggatctcgcgcgctttctcgccgagcggccggactgcaccgccgtgctggatgtgaccgctgaggagccgctgccgccgtcccacccgttttacacgctcgaaaactgcttcctgacaacgcatatcgcgggcagcgccgggcaggaggtttggcgcatggcggaatacatgctcgaggagctgcgccggctggaggcgggagatcagacgcgctatggcgtcacgcccgcgatgctggagacgatggcatgaaggggttcgcgcgcaccgatctggatttttcgctctgcgggctgaactgcggcctgtgtccgatgcggctggacggctactgccccggctgcggcggcggggcggggaaccagtcctgcaaaatcgcccggtgtgcgatggagcgcggcagtccggcatactgctttcagtgcgcggacttcccctgcggtctgctggggctggatgagccgtacgatatggtggtcacgcgccggaaccagcgcgccgatttgaagcgcgcggccgaaatcggccctgccgcctatgcgcaggagcagcgggaaaaggcggcgcttctgcgcgagctgctggaaaactacaacgacggacggcgcaaaacgctcttttgcaccgcggtgaatctcctgccgctcgacgacctgcgccgcctgcttgcagatctgccggcggaggccgtcaagcggaaagaccgcgctgcagcggccgccgcgcgtttgaccgccatgggcagtacgcgcggcatcgagttaaagctccgccgcaagccgaaaaaatgctgaaggaatcgaaaggggagacctccgttgtacaaagccattttatttgacatcgaaaacacgctgctgtatccggaagtatcgctggatgaacagctcgcggcgctcgagctcgacggcgcgccgcttttcaccgcggcctctgcccgcgaagcggtgcggcaggcggagctttggacggcggagcagatcctccgcgagcaggagacaaacacgcgcatggaggacgacgcgttttttgaaaacgtcctgtacgcttacgtgcggaatgcgtctaagcagaatgaaaaggcggccggtgtgatccggcatgcgattttggcggcgcgcggcacgcaaaatgacatgcctaaggcgctgcataagccggacggcctgccagcgctgctcgaagcgctttcggcccggtatacactcggcatcgtcagcaaccaccgcgggcgcatccgccgtgtgctcgatgcagaggggttcacgccgtacttcaaggctgtcatgatctcggaatctgccggcgtcgagaagccggacccgcgcattctgacaatgacgtgcgaggcgctcggcgtcgaacccgtggaaagcctctacgtcggcgatcatccgtttgatgtcctctgcgcagcgcgcgccggcatggactgcgcgtgggtcgataacggcgtattcaggccggaggatcttcccgaaaagccgcgctggacgctgcgcgcggtcacggcgcttactccggttttgtgcgcacaaaatgcagggaaagattcttgaaatttcattttctgtgccgaaaatggatttttctcttgaaatttgcaggaatctgcgtataatagattttgaaaggtctgtgtacggcactttgccgcacataaattttaaagtaagggagcataaaaaatgattcggatcggcattgcagggtacggaaaccttggccgcggcgtggaaagcgcgctcgcaggctcgaaggatatggagcttgtcggcgttttcacgcgccgcgcgccggagacactcaagacaaagaccggcgcgccggtttacgcaatggcggacgccccgtccatggcggatcagatcgacgtcatgatcctctgcggcggcagcgcaaacgacctgccgaagcagacggcggagctcgcgcagtatttcaatgtgatcgacagctttgacacgcacgcgaagattccggagcattttgcggacgttgacgcggcgtgcagaaagagcggcaagctcggcatgatctcggtcggctgggatccgggcctgttctcgctgaaccgcctctacgggcaggcgatcctgccgaacggcagcgactacacgttttggggcaagggcgtgagtcaggggcattccgatgcgatccgccgcattcccggcgtgctggacgcgcgccagtacacgatcccggtcgagagcgcgctcgagcgcgtccgcgccggcgggaacccgcagctctcgacgcgtgagaagcacacgcgcgagtgcttcgtcgtcgccgaggcgggggcggatctggccgccatcgaaaaggcgatcgtcacgatgccgaattacttcgccgactacgataccacggtgcatttcatcagccaagaggagctcgaccgcgaccacgcgggtatcccacacggcggcatggtgttccgcaccggtacgacagggttgaacggcgagaacaagcatatcatcgagtacaagctgacgctcgattcgaaccccgagtttacctccagcgtgctcgtcgcctatgcgcgcgcggtttaccgcctgcacagcgaggggcagaccggctgcaagaccgtgtttgatattccgccggcctacatccaccccgaaagcggcgaagcgctccgcgcaaagctgctgtaaaattaaaacagaagtaccggcagaaaaattccggtgcttctgtttttttatctatttgtaaaattctctttcaaaagctctcacggcctcgggattcagcagccattctttagccattctttttcgcctgttctatcatcacccgcacaagcgctttcaatgccctgacgctgatatttggacaatacgcttaaagggccgaagttcaggacgggaagcggctgattctcctttttgacaaccgcgttactgcaaataatgtgcccgataaccgtcctgtcctccaactccgcggtgaagctgagtgacccaatccatcggcgctgcctcagttcatgaaccatccagtgctcatgcggcatttcatggaacggcaaaaaatgaaatatacctgttccagatgcggcggcattatttctattcacgataaagaatgcagtgcgtgtccagaaaaaacgcagtggccgaatagagattggccgctttgtccggaagtattacagccatccatacatggatttttaattgtcttttatggagtgctgtccgccgcttattcgtacgtctttgcgacgtcgaggtgcagctcgtcgattttttcgcgcagcttgaggaaatcttcgaatgccgcgggcttctggttcgggttgcgcaaaagcgcggcggggtgcagcgtcgccatcatcagcgtgccgtttttctcaaaaaactggccgtgctcccgcgtgatcttcatatcggatttgatgatgcgcatggcggcgatgcggccgaggcagacgatgattttcgggcggattaaggccacctgattacgcagccaagtgatgcaggcctcctgctcttccggcagcgggtcgcggtttttcggcgggcggcacttgacgatgttcgcgatatagacgttcgttttgcggtccagatcgacggcggcgagcattttgtcgagcagctgtccgccgcggccgacgaacggttcgccctgcagatcctcgttctcaccgggaccctcgccgataaacatgaccttggaacgcgggttgccgacgccgacaaccacgtttgtgcgcgtttcgcacaggccgcatttgcggcagctgagacagttttccctgagttcctcgaaattgtcaaacatcctgtggcctccatacataaaacacgtattttaccgctattatagcacaaaccggcaaaaaaacatagccttttatattgtaattttgtccgccgcgtagtagaatagaattgaaaactaggaaaggctaggtatatcaaaatgaaaattatggtcgaaacctccgcgcgccacctccatgtgtcggacgcggatctcaaaaccctcttcggcgaaaacgccgtgctttccaacaaaaaggatctctcccagcccggccagttcgcgacgaacgaaaaggtcgaggtcgtcggcccgaagggctcgctcgtgatgtctatcctcggcccgacgcgtccggagacgcaggttgaggtcgcgctgaccgacgcacgcaagctcggcatcgcggcgccgatccgtgagtccggcgatctcgagggtacgcccggatgtacactgaaggggccggccggcgaggtcgtcatcgagaagggcgtcattgcggcgaagcgccacattcacttcaacgtcgaggaagcggccgaggccggcgttgtcgacaagcagatcgtctctgtgaaggtcggcaaggaaggcgagcgcagcgtgatcttcggcgacgtcgtcgtgcgcgtcagcccgaagtatgcggcggccatgcacatcgacaccgacgagtcgaacgcggcggcgctcagcggcaccgtagacggcgaaatcatcaaataaatagagcaaagttccgttaacgcaaaactggatgcagctgtacagctgcatccagttttttatgatggagatcgtaggggaaagtcaatggcctttatcgcgcaatatcttttgaacaacaattttgtccccctgttcagccagtaccgaaaaaccgcatttttcgtacattgcgaatggaccgcgcattgcagccgatggggtggtaaagcacttgtcgggatatgcttcgacgaggtcaaatccatctcgggcagcgtccctgcaagcatattggacaagctgtgtggccacacctgacttgcgaaaatccggtgcgatggcgaagcaaaagatagatttaattttcatgtccgcgcgcgattccggtatcggccaaccccatgaacgcagagtggagatacccagttgacaatccgcactggaattgcaccagccgataatccgattctcctgatatgcgagatagccttgaatgctgccgttgtgcacgaagtcaacagcgcgtttccttcgctcagcgcggcttggaaaccagtggtcgccgttgccggagtaagagtcatcatttcgccaagtgatgcaataacaggtgttctcgctacagcaatcaccgtgtggtgttgcatcgaagaagtccacgtatgcatctgcaagatctggagagagcttccggatgcttatgtccatgtgtttgccgcctccctttttccacctgaattcacgcaatgcggcgccttcgttcagacgcccttgtaagcgcggtagcgggcgagcacatcgcggtcgttttcgtaggtgatccatgccgcggcgtcgcccggcgcggtccagcgcgcgtcggtgacttcgccggcctgcacctcgacgtctccgcctgtgcattccgccgcaaagtagacgacgtctttcattacgccgggcttcggcgaatacgtgacgaccgcgcggaagcctgtgtcaagcgtgacggcaaggccggtttcctcgcggatctcgcgcagcgcggtttccgtctcggtctcattctcctccacgtgacctttcggaaaggcccaatgtccgccgttttcgtggcggatcaggagaatctcacagcccgtgtccgtctgccgcgcgatgaccgcgccgcaggatgtttcttttttcaatggaaagcctccttttgaacatcgtgcagaaaaggggctgccgaaccggccgcccctccatgcttatcgtacagaaaatttatagatcgttttggattcgaatgcttcgccgggctgcacatagcggaacgggaagttttcgtggtggacggaatccggatagaactgcgtttccagacagaaagcgccgtgcgggatcatcgggctgccgtccttatttttcgcgccgttcacgcggtttgcggtgaagagctgcacgccgggcatgtcggaatacacggtcatcacgcggccggtctccggctcatacgcttcggcaatctcccgcagccccgtgccgtccgcacagaaattgtggtcgaagccgccgcagagctggatcaagtggtcatctgcgctgatgtcctgcccaatcgttttgggcgcggtaaaatcgagcggcgtgcccgcgacgggcagcagcgtgccggtcgggatcaggtcgtcggtcacggccgtgacgtgcgcggcgttgattttcagcacggtcgagagcacgtccttcgagttgtcggccttcaggttgaagaagctgtggttcgttgggttgaagaccgtctttttatcggacgtaccgcggtaggcaatttccaccgcgttgtccgccgtcagcgtgtactgcaccgaaacgtgcagcatgccggggtagttctcgtcgccgtccgggctaacgtgcttgaaggtgatcgagggcgcgtcgccgtcctgcgtatcggtcacctcgaaaagcacctgatggtagccgccgcggccgccgtgcagcgtgttttcgccgtcgttcttgtcgagtgcgtaggtggcgccgtcgatcgtcagcgaagcgccgccgatgcggttcgcatagcggccgacaaaggtgccctgaaagttcggaccgaggtattcctcaagcgtcgcatggccgagtacgacgtcgccgaagcggccgttccggtccggcgtgagcaggcgcaggatgcggcagccgtagggcgtgacggtcaaggctgtgcccgccgcatttttcagcgtgtaggcggagacctccgtgccgttcggcagcgttccgaatacggagcaggtgagggacatttcggattattcctcctcctgcttgccgagcagcgccgcgccgatgatgcccgcgtcgttgccgagctgtgcgcggacgagcttcgtctttttcgtggagttcatcgcgtactgctgcgcgtccacatactcgcggaccggcgcgaggagcgtctcgccctcgttgcagatgccgccgccgatgcagaggatgtccggctggaaaatgttgatcatgtcggtgaggccgacggagaggtacttgatgtactcgtccacgatcgccttgccgaccgggtcgcctgcgcgcatcgcgtcaaaagcggttctgccgttgaccttgctgatgtcgccgtcgacgagcgtccacaccggggaatcctttggggcgtcctgcatgtggttcttcgtcgtgttgatcaggccggtcgcggagccgtaggtctcccagcagccgtgtctgccgcaggtgcaggggcggccgtccacaacgatgaccgtgtggccgatctcgccgccggcgaagttgctgccggaatagatcttgtggttgatgatgatgccgccgccgaggccggtgcccagcgtgacggcgatcgcgttgtcggcgcctgcgagcgcgccggcctgatactcgccgtaagccgccgcgttggcgtcgttctcaagaatgacgagcttgccgtttgtgcgctcggccatcatctcgcggagcttgaaatttttgaaatacaggttatttgcaaactcaatgataccggtcgcacggttgacggtgccggggcagccgatgccgatccacggcacgtcgtcgaacgtgagattggccttgccgagcgcctcgctgcagacctcgacgatcttgtcgcagaacacctcctccgaacaggggacaggcgtcttctgggacgcctttgcgataatcgcgttgttttcatcgacgacgccgacggcgatgttggtgccgcctacgtctacgccaagataatacataatacgaactcctttgatttgatattgcccgggatgccgcgaagcgcttccggttatttattaccagtatacaatagatcggggggatttgtaaatgcaaatccgcaaaaaaattgcatgtttttctgtcggtttgacttgattttgcaggatggatatgctatcataattcagttaaccgcgccgctatggtggaataggcagacacaagggacttaaaatccctcgatggaaacatcgtaccggttcgaccccggttagcggcaccacgtcggaatggactacgctccattcaaaatccccagccaaatggttggggatttctcatactgcttcgtcatttttcctttccgcaaaaagtcatgcttgcggcggtttatgcccttgtaaacccgggcgtgacgcctccgctgcgctgccaactttttgcggcttagtactatggtcccgtactggcatcttttttgtagcgtaaacccaagttaccggtgcgctcacgccgctgcggctccttttccgcgaacttttttactgcggaggcatcacgcggggcggcgccggcaaaaggctgcgcggggcatttcacaaaaataaaagcgggcgttgctctttttcatggagttgcgcccgcctcttgttttttgcgccggtctgcgctaagatgaaaccgtaggcacggcgcaggaactttccggcagccgggagagccccgccgggcccgaaaaacaaggagtggtgattgaaatggcaaagaagatcggatttatcgattattatctcgacgagtggcatgcgaacaactacccggcgtggatcgaaaaggcgtcggcgggcgcgtatacggtcgcatacgcatacgggaagatcgattcgccgctcggcgggcggacgacggaaaaatggtgcgccgacatgggcgtcgagcgctgcggaagcattgacgagctgatcgagaagagcgactgcatcatcgtgctttcacccgataaccccgagcagcactgggcgctctgccagaagccgctgcgctgcggcaagcgcgtctatgtggacaagacctttgcgccgaccgcgcagatcgcgcgcgacctgttcgcactcgctgcggaaaacggcacgccgatgtattcctcatcggcgctgcgcttttcgaaggagctcgccgagctgccggacaaggacgtgcgcttcgtgctgctgagcggcccgggaaagccggaaaactacctgatccaccagatcgagccgatggtcgcgctgctgcgtgcccgcgccgtgcgcgtgctctatgcgggcgttgagggggcggcgagctacaccgtcgagtttgagggcggcaagctcggcgtggcgaacctgcttgtcgagggcccgttccaaacgacggtgaaattcgccgacggcacggtcgcaccgatcgcggattcgaccgagaccttcgaccgcctgatcgccggcatggtgcggttcttcgaaaccggcgcggtgcaggtggatgcgcgggagacgatcgcgattgcggagatcctcgaggcggcgcacaaggcggaggaagcgccgggcacgtggatcgccgtgcagtgaccggcttttcggcacatttttcagaaaaattccgaaagtgttttctttttgcggattatgtggtatactaatcggcagaaaaacaattcccgagagaaaggaggcctttgcagtgaagtacgtctgtgatgtttgtggctggatctatgacgaagaggacggctatcccgaagggggcattgagcccggcaccaagtgggatgacctcccggatgattttgtctgcccgctctgcggtgtcggcaaggattccttcagcgcggaataatgttgaaggggcggaggaagccgagtgctttccccgccctttttctgcctgcccggcagattttcagaaaacggatggaaaaggattttatgcgggatttgaatgaaatttatgcggcgctgcccgaaaggcttctgccgtggtatcgagaaaacgcgcggaatctgccttggcgggaaagccgggagccgtaccgcgtctgggtttcggagatcatgctccagcagacgcgcgtcgaggcggtcatcggctattacaaccgcttcatggaggcgttcccggatgtttgggcgctggccgccgccgaggtgagccgcgtcatgaagctgtgggagggcctcggctactattcccgcgcacgcaatctgcaaaaaacggcaaagttggtggcggagacgctggggggccgcttcccggatacggcggaggagctgcagaagctgccgggtatcggcgcgtacacggcgggcgccgtcgcgtcaatctgctttgagcggccgagcgccgcggtggacggcaatgtgctgcgcatcatcgcgcgcatcacggcggatgaccgccctgtcgacctgccggccgtgaagcgggaggtcgccgagcgcctcaaggccgtctacccggccgggcactgcggcatgttcacgcaggcgctcatggagctcggcgcatgcgtctgcacgccgaaaagcccggcctgcgcggactgcccggtgcaggcgctctgccgggcgcacgattcgggcgccgtgctgcgctttccggtgaagctgccgaaggcggaaaagcgcgttgaggcgcgcaccgtttttctgctgcgctgcggggaatcgtacgccatctgccgccgtgacgaaacgggcctgctcgcggggctgtgggaattaccgaactgcgccggcgcgctggcggtcggcgaggccgtgcgctgggccgaggagcagggcgcgtcgccgttcggcgtcgtccgcgagctgcacaagacgcatatcttcacgcacatccgctgggagatgaccggctacgtgctcgactgtgccgagaggccggagcgcttcacatgggcggacgccgccgcacttgcggaaacatacgcgctgcccacggcgttccgcatgtttttggaggagctggaggaaaaatgacgccgcaaacactgatcggcctcgcgctgcaaatgcccggagcgtatgaggaccacccgttcggccccgaaagcgtgatcatcaaggtggaggggcgcattttcgcgcagatttttacgctgcgcggtgtggattccgccacgctgaactgtgaccggatgaccggcgatttctaccggcagatgttcccgggcgttgtcgtgcgcggctatcactgcccgccggtgcagcagccgtatttcaacacgtttccgctcggcgctgtgccggacagggcgatccgcgaaatgctcggccacagctatgaaacggtggtggggaagctgccgaaatacaagcgggagcggctgaaagcggcggcacaggcgccgcggcgggaggccggacggtaagccacggcagacaccggcagcgagggcgatcgaaaattaaagggggagcgcagagcccatgccgggttccgcgctcccttttaattttcctgtgcagcgcgcaggacggccgcgatgctctctttaagccggatattttcgacgcgcaggaccgggcaggccagcgtccgcattcacgcctcgtattttgcgggcgagcgcccgccgcgcgtgccgtcctcataggctgcggccaagcttatgaaatccaatgtgtcccgcggcattcgccgccgggcagaatgcgcgcgctgtaccgctcggcttcgtgctttttcaggcgctcggtgcgcagggccggcggcacgtaacgaatacggcgggatcgaaaagcggcgcaaatacttcgccctatccggtaacggagccgttcagcacccagcggcctgcgttttcgaggccgcggcggagcagccgcaggcatttctcccggtcgcgctcctgcgtgaacggttcggcggccggcagccagaagcagcggtcggcgtcgaagtgcgcgcagccgaggcgtgcggagagctgcgcggagatcaccgtggttccggagccggaggcgccgaaaagatgaatgtgttttttcatagaaatcaccattccttattttttgtgctggtcggcgaagccgactgccgctttgctcgtctcggcaaaggcacaaatcgtgtgtgaaaaggtattcttcacactacctccttggcgtcaaacgggagaataccggatgattctgaccgcggaacgggggaataggcggggcatgcacggaggcccgcggggccggggcgcaaaaaacaagcacaaaacggcctgcttgatcgcggggcgttctgtgctttttatcagcgcttattcggcgagcgcgcgggtgagccatgcgtccgcgatgtcgagcgcgaggtacaggccgtttttctcgctcgtcttgacaatctgctttctcgtgcggatctccgggtctgtgtacatcagctgtacgatacacttgtcggcgatttccatatcgtcgagcggctttttggttttaatatcgatcttgatcacatacttatccgtcatgtttccgaggtacagcgtgtcgccgcagcgcacgagcggcttgccgcggtacatgggaaacgcagtattctttttttcgctcattctattcaccatctttcatcgaatttgcgtctttagactacatttaagtatagcatatccgggcagaaaacacaaacattatttttgaagcagaaccgccgccgtcggaaagcccgtgcggcggcggtctcatgcccaaattattcgcccagatacgtgcgcaccatcgccttcaaaagctcatcgcggtcgatcttgcggatcaggctgcgcgcgttgttgtgcgtcgtgatataggtggggtcctcagagaggatatatcccacgatttggctgatcgggttatatcctttttccttaagcgcatcgtagaccagcgtcagaatctgctgcatgtcgggctgctgaagcgcctcgaagttgaacgtctgggtatggtctgtgaaattgtctgccatgtggaacacctcctcgccggcggacggataagaagccgcgcaggctccatataagtgtatgccggaaatgaaacaatatttgctttttacagaaaagctctgcattaagcataccgcaaaagggcgaaaattgcaagaggcggcgaaattatttacaaattctttttatctgagcgtcacgcccatggcgccgagccgctcgacgatcgtatcgatccagccctgcacctcggccttcgagagcgttctttccacagaggagaatgtgaagcgcagcgtgatgctcttaacggcgccggtataggaatcgatcagcgaaacgccctttaaaagcggcgtgacgtccgcccatgcggccgaaagcgcgctgtaggtctgcgtgtcggagacgacgagggagaggtcgatgtcgatgcccgggaactttgagggctcatcgtagcggatcacggaggcgggcaacgccgagaaggcgtccatgtcgagctccgccgcgacgatcacggcctttttgtcgatcttcgactgcacggccgggtgcacgatcgtgatgaagccgaggcacacgccgtcgagccagatgtccgccgtgttgcgcggatgctgccagttgtgctttgcctctgcaatgcggaattcgaacgggcggtgcttgagctcggccgcgaccgaggccatcaggtcgcgcaggccgaggtagacgtccttttccgagcgcgtgcggctgtacagggcgacgccgaggtgcttgcgctcgctgcacaggccgtcctcgcgcaggccctcgacgacgcgggcgatctcaaagatgccgaactcgttcgcgtaggccttgttctcgttgacatagctgatcatcgtcggcaccatcgagcggcgcagcacgacgtggtctggggtcatcgcgttgatgacgcggacgttatcctcgatctcgatgttcagctccttgtatttcttcgcgtcgcaccagatgtacgagtgtacctcgtgcaggccgtagcgctggacgagcaggtccttcgcaaagcggtcgtcgttgctgctcgcggtgcgcagcaccggcgcgagcgcactcttcgtcgaggtgatcttgaagttgtcgtagccgtagatgcgcgtgatttcctcgatgatgtccgccttgatcgtgacgtccttcgtcgcgcgccaagagggcacgtgcacggtgaaggtctcgccggaaaggcttgcgttgaagccgagcgcgttcagcgtgttgagaatctgctcgttggaaatatcgataccggtgtaacgatccacatactttttgtcaaagctgaggtcgatcttatcgtagtggcgcacgtaaacgtcggtcatggaggaaatgacctgcacacccggatcgatttcggtgagcagctgcatgaaatgttcgatcgccgtcgtcgtaatctcagggtcgagcgtcttttcatagcgcattgaggcgtcggtgcgcaggccgaggcgtgtcgaggatttgcgcacgctgaccgcgtcgaagtttgcggattcgagcagcaggctgtcggtgtcgtcttcgatctcagagctgaggccgcccatgatgccggcaatcgcgaccggctcgcccttcgagcagatcatcagcgtattttcgtctacgcggcgctgcacgccgtcgagcgtctcgaagtcaaagggcttatcgaagcgcttgacctgaatggaatcgacctttgcgcagtcgaacgcgtgcatcggctggccaagctcgagcatcagatagttcgtcaggtcggcgagcagattgatcgcgcgcatgccgcagtagaagaggcggatgcgcatgtcgaccgggctgactttctttgtgatgttgcgcaccttgagaccggtgtagcggaagcacagctcgcggtcgatgacgtcgatgccgatcggcgcaaggtccttgtacggcgtgaggtccatgcggctgatgggcttcagcgcgcggcccgtcaaggcggcgaattcgcgcgcgatgccgtagtggccccacaggtcggggcggtttgtcagggacttgttgtctacctcaaagacgacgtcgcggatcgcatacgcctcggtgatcggcgtgccgagcggcagatcatccgtgatctcccacaggccgctgtggtcggcgctgatgccgagctccttttcggagcagcacatgccgtgcgattcgacccccgcgatcttggcacagacgatgtccatgccgccggccttgccgccctcgcgcgcaaacgcgacggtcatgccctcgcgtacgttcggtgcaccgcagacgcagtcgtagaccttgtcgccggcgtctactttcagcaggtgcagctttttcgaatccggatggttttcaacggagaggatgcgcgcggcgacgacgttctcgatgtcgcggcccatatagtagatgtcctcgacctcggcggtggaaagcgtgaactggtggatcagcttttcaagatcgaggccggaaagatcaacgaagtcgttgatccagttcattgaaatcagcatgtaaaacgactcccttcctgtttattcgtgattgaactgcgcgagcgccttcaggctgccgctgttgaggtcgcggatatccttgaggccgtagcgcgtcatggcgaggcgcgtcaggccgaggccgaaggcgaagcctgtgtattcctcggggtcgatgccgccgtcgcgcagcacgttcgggtgaatcatgccgcaggggcacagctcgatccagccggagccgtggcaggtggagcagcccttgccgccgcagacatggcagctgatgtccagctcgaagcccggctcaacgaaggggaagaagcccgggcgcaggcggacgttgacgtcctgcttgaagaccttcgaaagcatcgtcttcatgaagtagatgaggttcgagatcgagatgtccttgtcgatcatgatgccctccatctggaagaacgtgttctcgtgcgaggcgtcggtgctctcgttgcggaagcagcggccggggaagatggcacgcagcggcgcgccatatttgcgcatgatgctgttctgcgcggccgaggtgtgcgttttcaaaagctggccgttgtcgaggtaataggtgtcctgcatatcgcgcgccgggtggtgcttcgggatgttgagcgcctcgaagcactcgtaatcggtgacgatctccttgtaatcttctacggtgaagcccattgaggcgaagatctcctcgagctcgcgctgcacgagcgtgatcgggtgataagagccgtaagcggtttccgccggcagcgtcacgtcatactgctcggcactgttgacgaggcggtcctcctcggccttgcggatggcctcgatctgcgcggtgattttttcatcgacctcgcgctttaaaaggttgattgtctggccaaattcctttttctcctcgccggaaaggtccttgagccctttgagtagctcggttacggaaccctttttgccgaggtaggcgacgcggatcttttcgaccgtctcgctgtcgcgtacggcggaaagctccgtttcaaatttctgacgcagctcggcgatgttttctctgatgcccataatctgaacgtcctttcgtaaaagtattttccgtttgcaccggggcaaaggcaaaagaaaaggcccgccccatgcgaaacacatggggcgagccggaaagctcgcggtaccacccaatttcggtgccaacacaccctctaaagcccgtaacggtgccgctccgtcggcgcctactgcatcccgctttccaaaaaggtgtgccgcagcggcgaaataccgccgtgcgcagacagaaaagggggccgaaccgttcagcgccgccgctccaaagagaacttcgccggaaccccgcagaggcacgcttgcagccgacggcgcgccctctctgcccgcggaaaaaaccgggtacttttctttttcatcgcgtttagcgctattttagcacaggatgcggcgtttttcaagtgttttcttccgcctgcggatagaggcaaacaggttccgagaaaattaacaaaatagatggttgaacttccggcgcgcctgtgttataatgacaaaaataagcgatttgaagcaagggaaggtaaaacacaatgatgacagacattttcgtggaatatatggtcaagaagaagattgggccgaaggatattttgatctgcctcggcgcgtcggttctcggtgcggtgctgctttttgtcggcctgatgctgacgccgattctgcccatgattccgtttctcgtactctgcggcgtgatttacggcctttactgggtcatctcctcgcgcagcgtcgagtttgagtacagcatcacgaacggcgacatcgcggtcgataagatcacgaaccgcagaagccgcaagcgcctcacgtcgttcgacgcgaaggccattgaggagatgggcaagtacacggagaacgcgcagaagctccgcggcaagcgcgtggataagactttctttgcgacggagaccgacgaggccaaggacgcgtggtacgtgattgcgaagagccgcaagaccggcctcacgctgcttgtgttctcgcccgacgagcgctgcatcgacgcgatcaagccgtttatggaccgccgcctgaaatttgagatctttgggcgcggctgagcacgcgggaaaataaaagagctttcggacgcacggcagctatgccgcgcgtccctttcttttgcggcggtttcttgacaaagccgcgcggatatggtagcttttagtgggaattccgccggcggcgccgcgcagaaaggcgttttgcgcggcagccgtgccgcgggcggaaagcaaaaaatccggagggcgaaaatgggaaatgattatctgacaaagaaaaagccgctttcggcgcttttggtgtttgcactgccgatcatcataggcaacctcttccagcagacctacacgatggtggactccgccgtcgtagggcgcttcgtcggcgagcaggcgctcgcggccgtcggcgcctcctactcactgacgaatatcttcatctgcgtggcgatcggcggtggcatgggcgcgtcggtcacggtcagccggtatttcggcggcaaatcgtacggcaaaatgaaaacggccatttccacggtgtgcctttcctttctcggcatcagcgtgctgctcggcggcgtcggactgcttttcagccgcagcatcatggtgctgctcaacacaccggcagatgttctggacatggcggtcgagtatctggacatctatttctacggcctgccgttcctctttatgtacaacgtgctttcggcgatgttcaacgcgctcggcaaatccaaaatcccgctgtgcttcttgattttttcctcgctcctcaacatcgcgctcgatttcctgctcgtcacccgctttcagatgggggtttcgggcgtcgcgtgggcgacgtggatcgcgcaggggatttcggcggtgctctcctttgccgtgctggtctgggagctgaagaagctcggctgcggcaaggtgaagctgtacgaccctgcggagctctggcgcatgacaaagatcgcgctgccctcgattttgcagcagtccacggtgtcgatcggtatgatgctggtccagtccgtcgtcaacgggttcggctccgaggcgcttgcgggcttctcggcggcgatgcggatcgaatcgatctgcatcgtgccgatggcgggcatcggcaacgcgatttcctcttatacggcgcagaacatcggggcgaagaagctcgaccgcgtcgtgcagggctaccgcgcggcgcaggggatggtcgtggtctgcgccgcggcgatctgcctcgtgcttgagctgttccacgggccgatcatctcggtctttctcggggcggacggcacggcggccgccgtttccacaggtcagggctacctgcagtttatgggctggttcttctgcctgatcggctttaagatgacggtggacggcctgctgcgcggcgcgggcgacatgaagatgtttacggttgcaaacctcgtaaacctgtgcatccgcgtcgtggtggcggttctgttcgcgccgcgcttcggcatcgcgatggtctggtacgccgtgccgatcggctggtttgcaaactgggcgatctccttcgcccagtaccgcacgggaaaatggcgcaaaaaggcggtggctgcgcagccgtgatgtgaaatcccggcggctctcggcaaggcataaaaatacaggcggccgccctttgtgcgcggtccctgctcagagtccgcgtgtcccacggtggggcgcgcggattttctattgaaatttcccgggaatttgtgtatgctagaggtataaagtacagacagggggagtgcggttcatggtggttttgaaggcggcggaaatccgcgggctggaggaatgcgcggtggaatccggcgtttcgatggaaacgctgatggaaaacgccggcgcggcggtcgcggcgtatattggggagcagatcgaggtgcgcggcaaaagtgcagtgattctctgcggcaagggcaacaacggcggcgacggctttgtaatcgcccgcctgctctcgaaggccggggcgaaggtgacggtcgtgctgatgcagggggcgccggcgtcggcgctcgcgaagcaggcgtacgacaagatgcacaaggggatcgacatcatgctggcgcgcgcggccggaaaggcgatcgataaggccgacctgatcgtggacgcaatattcggcttcagctttcatggccggatgccgcaggcaatggagcccgtcatcgcgcgcgcgaacgcttcgaaggcgctgcgcgtttcggtagacctgccgagcggcgcggagtgcgataccggcgctgtgaacggggcgtgcttccgtgcccggcatacggtgaccttcacggcgatgaagcccgcatgcgttgtctacccggcggcggcctgctgcgggcgcacggtcgtgcggcaggtcggcatccgccgggagtttctgcagcttctgccgtacgacacggcctcggtgcagctcggcgacctctgcccgctgttcccgaagcgcgaccccgaggggcacaagggcacctacgggcggctgctcatgctctgcggcagcatcggcatggcgggggcgtgcatcatggcggcgcgcggtgcgctgcgcgccggcgtggggcttttgaatatcgccgttccgcatgcgctttacccggttttggcgcccgctgtgccggaggccgtgttcacgctgtatgacccggaggatacgtcgttcccgagcgtgctcgaggcgctcgaaagggcggaggcctgcctgatcggatgcggcctcggcaccgcgccgtatgcgcagcggctggtgcacaccgtgctcgagcgcgccgcctgcccggtggtgctcgatgcggacgcgctgaacatcctctcggaatcgccggaaaagctgctgacgccgcatgtgccggtgatcgtaacgccgcatcccggcgagatggcgcggctgtccaaaaagctgatggaggatctcagcgcggaccgcatccggacagcgcgggagttttccgcgaaataccgcgtgatcacggttttaaagggtgcgggcacggtcaccgccgcgccggacggcgaggtgcgcgtcaacacgacaggcaacccgggcatggcgaagggcggcagcggcgatgtgctcgcgggcatggtgggcgcgcttgcggcgcagggcatgaagccgttcgaggcggcctacgccgccgtgtgcatccacggcgcggcaggcgaccgctgtgcggaaaagctctcgcagcacgcgatgctgcccacggacctgatcgaagcgctgcccgcggttttccgcgaaatcgagggcaagtcctgattttccttcacagaattcacacgcccgaataaaatagaacaggcgctgatctatttgatgtttaagcgtccgcaaaacgggcaagaataggatcgaaagatcaaattcggagtgtgaaaaccgtgaacgtacgcagaggagatatttactacgcagatttgagccccgtcgtgggcagcgagcagggcggcgtccgcccggttctgatcgtccagaacgatgtgggcaaccggttcagcccgacggtgatcgccgcggcgatcacaagccagcgggataagacgaacctgccgacgcacattgccttgcatgcagaccgcaccggcctgcaaaaggattccattgtgctgctcgagcaggtcagaaccatcgataagcaccgccttaaggaaaagatgggcaagctcgacgacgacgccatgcggcgcgtcaatgaagcgatcggcatcagcttcggcctttctacatagaggccgggcataaaaaggcaagcgccgccgctcctgaaagcaggaggacggcgtttgccttttttggaataaaatgctgaattgatattttcttatagagggactaagggatggcattggcaaaataccgtcccctaatcttcatgtcaaagcggcaggtcttgactttccggaaaaaaacagtacaatatacacatacccccaacagtataggagcgttgaaaatgaaacaatgtatggatgctgaaaatctgcaccgcagattaaaaaaaataattggacaagttcaggcgattgacagaatggtggatgaggatgttccctgtgaagatattctatcccagcttaatgccgctaaatccgcattgcataaatgcggacaggtagtgcttgaaggacacattaagcattgtgtaaaagacgggatagagcacggagacgcagacaaaacgattgaggattttacgaaagcggtagagcgtttcgccaatatgggataatgagttttagcagaaaagcagtcgaaatagactgcttttctcttttaccgccttgacaaaccaataccccctatggtattctgtacctataccccataaggtatagaacggagggctttgatgaaatcatttatgggaaaaattgaacacctgcttgaactcggcggcacgaaaaaagatataacactccttgctatttcgggcgctgcgctgattttcagtctgacaggcatattggattttctgcctttcaatattgcttgggtttcaatcattctgtgtggtgtaccgattattttagaagcgattgtcggactcgtcacggcgtttgatattaaagcggatgtgctggtatcgcttgcgctgattgcttctgtctgtattggcgaggattttgcggcgggcgaggttgcctttattatgcagatcggcgctctgcttgaagatttaaccgtagcaaaagcaagagcgggcattgaaaaattagtaaagctgacgccacagacagcaagagttgtttcgggcggcgcagagtctgttattcctgcaagcgaggtgaaaatcggagatattctccgtgttcttccgggcgagggaattgctgttgacggtgttatcacttcgggacaaacttcgattgaccaagcggttatgacgggcgagcctatccctgtcgataaaacggttggcgatgaggtatcgagcggaacagtaaaccgatttggcacttttgaaatgagggcaacaaaggttggcgaggacagctctattcagcgaatgattagccttgtgcagtcggcggatgcaggtaaagcaaagattgtcggtatggcggacagatgggcaacttggattgtggtaatcgctctgactgccgctgctctgacttgggcgataacgggagagattatccgtgcggttacaattcttgttgtgttctgcccctgcgctttggtgcttgcaacgcctaccgcgattatggcggcaattggcaacgctgcgaagcacagcttccttgtgcgtgagggagacgctttggaacggctgtcaaaggttttaaaaatcacttttgataaaacaggaacgctgacttacggaacgccgaaagtcgttgcggccaaatctctttcggacaattatacggaacaggacatttattctcttgccgctgctgcggagcagttttcagaacatccgcttggaaaggcgattgtgaattgttacaaacagcacacagatacccccatttcaaatgcgacagattttgaaatgcagctcgggcggggcgtatgcgctgttgtagatggaaagcgtattcttgcgggcaatatagatatgataagcgagaacaaaatagcttgtaagacaaatcctgaaattcaaggctttttgaacagcggcagcacagtaacctacatagccgcagaaaacgaggttgtcgggtatcttatattatcggatacaattcgaaaagaaagcggcgcaatgctgaacgccttgcaaagctgcggcgttcagcccgtactcttgacaggggacaatgagaattccgcaaacagcattgcaaagcagcttaacataaatgaggtgtacgccaactgtttgcctgaagataagctgaagctgattgaaaaataccaagaggacgaacagcctgtttgtatgattggcgatggtatcaatgacgctcccgccttgaaaaaagcagcggttggtattgcaatgggcgggattgggagcgatattgcagtagacgcagcggatattgtattggtggatgacgaagtaaaggagcttccgcacttaatatcgctttccaagcgaatgatgactgcgataaagattaacttgagtttttcgatgggacttaactttcttgcaatcgtgcttgctatgacggggattttaaatcctgttgtcggtgcgcttgttcacaatgcaggctcagtgcttgtcattataaattcagctctgctgttaaaatggaggaaaaggaaatgatgatttcctttgtcggtccgctactcggtgctttgattgccggcgcaggtatccattatcttgtagaataaaatggggaattgcaagaaatctgcggtttgtcatgaaattaaaggggatattgttgaaaaaataatgcgaaatttatgggatctctattgtcttttcccttggagtgtggtatcaatttaaggatatacaaaacaaagaggagtcggaagcatgcttggatttttgaaaaagaacggcgcggcgctcaccgcgctttctgcggcagcggcggtgttccttgtcctgatgatgttcaccggacagtggccgtggcgtgcgaacgactacaacacgtatgccctgcaggcggacgcatggctgcacgggcggctcgatctcgggcaggattacccgtggctggagctcgcggtgtacgatggaaaatactttgcgagcttcccgccgttcccgtcgtatgtgctgctgccgtttgccgttttctgcggggcggatacgccggaccatctgatcgcgcttttcacagcggcgcttgccgtttggtatgcggcggcgctgtaccgcgaggcgggcggggagcgcggcgcgctgttttgggtgctgtttttgtttctcggcacgggctacgcctacattgcggtcaacggctacgtgtggtttctcgcgcagtcgatgtgcttcacgctgtctttgatggcgctgacctacgcgctgcgctgcgccggcggacgcgcgctgaccctttgggcctgtgcggtcggctgccggccgatggtgatcctgtttctgccggttctgctcgcgctgctctggcgcgcatggcgtgcggaaaatccggcgcccgggctggggacgcttctgcggaaaaagctgtactggtgcgccgggccggctgtgcttgcggcctcctacctgcttttgaacttcctgcgcttcggcgatgcgtttgagttcgggcacaattatctgccggaatttgtgcgggcgccgcaggggcagttcagcctgtcgtatttctgggaaaacgccgcaaacctgctccggctgccgcgttggcagggcgacacgcagccgctcgatttcccgctgaccaacggcatggcattctggcttgtgaacccgctgctgcctgtggccgccgcggcgtggggctgggctgtaaggaaaaagcggcgggagcacccgcttctgctgtggatgctcccgccgctcgtgctggcgtatatctttgtgctctgctgccaccgcacgctcggcggctggcagttcggcgaccgctatctgctcgacgtgatgccgtggatcttctgcgggctggtgctctggaagccgaaggacccgcgctttgggaatgtgtgcgttccgctgtttgccctcggcgcggcggtcaatttcgccgggacaattcaggtctacagcctttggagctgatcatttcccggggttgtacgccgtgaaaacgatgtggggcatatccgtgtggtagtaatgcttcgtgaagcgctcggtctcccgcatgccgttgcgctttgcgacattctgcgaggcggtgtttgtatcgcggatgatcgagcacacgctttcggcgtgcagcacctcgaatgcgtatgctttgcacgcggcggccgcctcggtcgcatagccgcggtgccagtgcgccttttcaaagagatagccgatttcgagcgcctcgcgcccctcgatgtcctgcatcgtcaggccgcactggccgatcatttcgccggtcgctttcagctcgaccgcccagagcccgaagccgtactgcgcgtagcggccgagctgccggtcgagccattcctgcacctccgcgctgctgaaggcgtgcccgtaggcgtacatcacgtccgcgtcctgcaaaatccggcacagggcggggaagtcgtcctgtgtcatccggcgcagccgcagccgctcggtttccaatatgtacatagaaattttcctttccgaatgccttgcattcaagcgttccgtccagcggtataaaatgagaggccggtatatgtcaggtgttatgcagctctgtgtcgagaaaaacgcgcgagccggtcgcgccgcgctggccctgatatttgccgcggtacggcttttccgcggcggcgtccatctgcgcgaagacgagctggccgacgcgccgcccggcggtgagctcgatcgcgcagcggttcgcgttaaacagctcgagcgtgatctccccctcgaagcccgggtccacccaaccggcgttctggatgaaaagccccatgcggccgagcgagctgcggccctccacaaacgccgtgagatcgtccggcagggcgaaatattccatcgtggtggcgagcacgaattggccgggcagaagcaggtagcgctccgtttgaatcgtcttataggcgatctcgcggtccatcgcgatgatgccggacgaggaatcctcgacgatgctgaacgtgctgccgaggcggatgtcgacgctggcgggttggatctggctggcctcgaccggctcgatcgtcagcgtgcggtcgaggagcatgcggcggatcgttttatcggataaaatcattgttcgtcctttccgggtgcgcgcggcgcgccctttttgcgttccatgtatttttccacgcggcgcagcagcgcaccgcggtcgtttttgaggctgccgtcgaccacatcgcgcagcaggccgttcagcatttccccgatttcacggccgtgcaggccgcgcgcggcgaggtcgtcgccgttcacttgaagctgctttagggtgcggcagaagccctcggcctcgaggcggcgcgcctgtgcttccgcctcccgaagcgccgaaaggcgcggcgcgacgaattccggcgcgtgggcggcgctgtccgcgcgggcgacgtcgagtagcttgtagaatagggggaagccgagcgatgcgatcagccggcggagcttgaccgggcgcatcgggaaatggaggtcgtgcagctcgacgagcgtgacgacctcgcgcagcgtgcggttatcgcagtgcagcgtgtgcagcgcgctgcgggcgatctcggcgcttttggccgggtggccgtaaaagtggtcgaagccgtctgcgccggttgtgcggcagggacccttgccggtgtcgtgcaggagcaccgcgagccgcacggtttcgtcgggcggcgcggcctcaagcgcgtgcagtgtgtgctcgaacacgtcgtagatgtggtagcggctgtgctgcgggacgccgcagagcacggaaagctccggcacggcggcaaacagcagcgccgggcagatgcgcagcgcgtctgcggcgtgcggcgcggtcagcgtctttttgagttcgacaaaaatgcgctccttagcgacgcgggcgatcagcctgtactgtgcttttaaggcgcgccgcgtctcgggcgcgagcgcaaagccgagcacggccgaaaagcggacggcgcggaacagccgcagggcgtcctccgaaaaacgtgcttcagagtcgccgacacagcggattacgccgcggctgagatcctcgcgcccgccgaacgggtcgatcagcccctccgtctcgctgtaggcgatcgcgttgatcgtaaagtcgcgccgggcgaggtcatcttcaatcgcggcggcgaacgaaacgctgtccggccgccgcccgtcggagtaagcgccgtcgatgcggaaggtcgtgatctcatacggtgcgccgccgagcagcacggttatggtgccgtgccggatgccggtttcgatgaccggaagatcccgaaaaacggccttcgtttcttcggggcgcgcgtcggtcgcgatgtcccagtcgtgcggggtgcgcccgagcaggctgtcacgcacgcagccgccgaccgcataggcgcggtatccggcgcccgcgagacgcgatacaatcaccttgcaggcgtcgggcattgaaatttgtaggttcacctgaaatcacatcgtttctgcgggttgagggaggcggaggaggtcactccgcaaagatcgccgtattgcgcgaccaagagccgaaggtgaggccgagccgcacggaaaacggcatatcctcataggcttcaaagcgcgtcgccgcaagaaaatcggcgatcgaataggttgtttccacgccgcggcttgggctcaagacagagatcgcatcggcctcggcatcgagcgcagtcacaaccgcgtactgtaggcgcatgtccccgccgtccgccgcggcgagcaggacgatgaccgggcggtctgcgcggaggctctcgtagatctgcacgagcaggtcgcggttcgacatgccggtcctgagctgcacgcgctccgcggaaagcgccgattccatacaggcggcgatttcggaggggaagaccacttccgtctttacggcaatcgcgtcgtccgcgacgggcgcaccgagcttcgcgcatacgatctgcgccgccgcaaagccgtcgttttcggctgtatcaccgaccgtaaggccggctgtggaaaccggctctgcgtatttgctgctttgatagatcgtcgtgtaggcgtcgtccgtcaggaaagcggcggcgagatccttcagccagaagccgccgcatacgagcaggacgaaaacgagcagaacggagagctcgcgcaggatgtgccttgcggcctgcttcggggtttcgccgctgtagaggtgctttggaagcgtgcgccgctgtgccgtgcgccgcggtgcggcggggcggggggctcgggccggtgcgggctctgcggcaggcggtgcggcctttcgcgcagcaaagctctcatcgagcacggtcggcttatcgaaggcaattgtttccgcctctgcggcaggcgcggccgtttcgccgctctgctccgagggctttacgggcgcatccgaaaagacctgctttgtatataattcgttcggctcgccgccgggcacggacgccgctgcggtctcgcgtttttcctccatctgtaaacgcaccgttcctttctcgtaaaattcggggcatgcgcgccggcggactccagcacaaagccgggggcgtttcatggcgcactgttttttataaggatagcatgaatccctgcgtttttcaatgcaaaatcccgttttgcacggaaaagagccgcagctgtgccgccgcgcggggcggccgattgacacgccgggcgaatcctgatagaatacgcacaaaagcgcagcagagcgcgggcgggagcatcgcctgaaaaaatccggccattgtgacaaagtcacggaaatgtgcgcggctttgcgctatactaaaaataacagccgggcgcagacggcctgccgcccgggattttcgcaggaggagaatggaatccatgcagtacgtcatatcgtttttagagggcatcatcacgtttatttcgccgtgccttttgcctatgatcccgatttatatttcctattttgcgggcggcggagagcggacggcgaagaaaaccctgaccggcgcgctcgggtttgtcctcggcttcacggctgttttcatggcgatgggcgcgctggcgggtacggtcggcagctttctgcacacgcatcagacggcggtgaacatcgtatcggggctggttgtgatcttcttcggcctcaatttcctaggcattttcaagctgaacctgtttaagggcagcaagcaccggatggacacccgcgatatgggctttttttcggcgctgctcttcggcgtgatcttctcgctcgggtggacgccctgcgtcggcgcatttctcggctccgcgctgatgcttgcctcgcagcaggggcacgtgctcgagggcactttgatgctgctgacgtattcgcttggcctgggcatcccgttcgtcctcagcgcggtgctgatcgattatctgaaatcggcgtttaactggatcaagaaaaattacagaattatcaatatcgtcagcggcagtctgctcatcgtgatcggcgttttcatggcgaccggcatgctggggcggctgctcagcctgctgagttaaggagcgttttgcgatgaaaaataagaaaatggttctcattctcgtcctcgtattcgtcgtgctgctcggcggcgcgtacgtgctctacagccggttcagcgacgatttcaagcaggagcagctcagcgggcaggcagcttcgaatgcgggcgattcagcctcctccggcgcagacggcaaggaaaagcaggccgcgcccgattttaccgtgtacgatgcggacggcaatgcggcgcagctttcggactatatcggaaagccgatcgtgctcaacttctgggcaagctggtgcggcccgtgcaagaacgagatgcccgagttcaacgaaaaatccatcgagctcgagggcaaggtgcagtttttgatggtgaacatgacggacggcagccgcgaaacgctggatacggccaaggcgtacgtggaaagcgagggctttacgttcccggttctgtacgatacggacatcgacgccgccaacacctacagggtttactctctgcccaccacgtatttcatcgacgaaaacggcggcttgacggcgcgcgcctcgggcacgatcgacgcggctacgctgcaaaagggcatcgatatgatttatacggagtaagcgggaaaatccgaaatattttgcgcggcgcttgaaaaccggcggcggttcatgtataatcaaggacaaagctcaaagattgttatacgaaaaggatgaagcatcatggcactttttaaagattggcaggactttgccgaccaaaaatccgcgcagcccgacgcgcagcagttctgggcgggctactttctgcgtgagaaggatttttacgcggagcttctgaaaagcgagccggtttccggcacggtgcaggcgctcgcggagcgctttaacgtcgaacttgtggagatgaccggctttctcgacggcatcaatgagagcctcaagacggcgctcgacctcgagggcctgacggctgagaccgaggtttcgctcgactacgaccccgagaagctctattacaacatggtggccgcaaaggccgagtggctttacacgctgcccgagtgggagccgatcctcaccgaggagaagcgccgcgagctctacaaggcgcagaagtcctcgacgacggtcgtcaagggcccgaaggtcggccgcaacgacccgtgcccctgcggaagcggcaaaaagtataagaagtgctgcggcgcgctggcgctgcggcatttcgaggcggaaaacagcatgctgcgccgcacggctgcgcggctctccgcaaagccggcgggcgtgctcgaggcggtaattcaccgggaagcgcagcttgcggatttgcaggcagcgctgcggcagaagaatgcgcagctcgccgcgctctatgcggaaaggcttctcgcggaaagcacggcctgcgcgggcttccggcttccggcttgcggcggcggttctgccgggggaaatcgacctgtgccgcacggcggcggaatcgctgtgcgccgcgggcgatgttctcgcggttctgctcagcgcggaggggacgcgctttcgctatgtctgcatggcgggcgcgcgctgcccggcggactgccgaacggcggcgaagcggctgtgcgaatcgctcggggcaaagggcggcggcagcgaaaaagcggcgcagggcagctttgaatacggcggggcgcacggcgcgctgctggaaaagatcggggaggtgcttgccgatggctgtctcgcgccttgaggcgtttctgccgcacccggtcgagacggtgtggcgtatcgtgacggattatgcggactgcggctggcgcagcgatctggagcgcgtcgagacgcacggcgcgggcggcttcaccgagtacgcgaagggcggttatgcgacgcgcttcaacgtcacggcggaaattccgtgccgccggtgggcgttccggctggaaaacggcaatatggccggcgaatggaccggcgagtttgaagcgcagggcggcgggacgcggatcgtctttacagagagggtgcgcgtgaaaaagctgtggctgcgtccgtttgcggggttctacctccggcggcagcagagcgtgtatctgcgcgatcttctgaaagcgcttgaaaaagtgtgaacggggcggcctttatgggccgtcccgttctccgtggaaaagcgcgccttaaagctcgcttttgattttgcgcatcgcgcctttctctaagcgggaaacctgtgcctgcgagatgccgatctcctcggcgacctcggtctgcgttttgccgtcgataaagcgcatcgagaggatctttttctcgcgcggactcagctcgtggatggcctccttgatcgcgatctcctcgagccagtcgccgtccgtcgtgccgcctttgatttggtccatgatgtagatggtgtcgccgccgtcggagaaaaccggctcgtagagcgagacgggctcgacgatcgcctcgagcgcaatcacgacgtcctcgggcggcaggccgagcgcctcggcgatttcggtgatgttcggctcgcggcccttttcgttcgtgatctgctccttcatctgcatcgcgcggtaggcggtgtcgcgcatggagcggctgacgcgcacggcgttgttgtcgcggagaaagcgcttcacctcgcctgaaatcatcggcacgccgtaggtggaaaacatcacctcgtggcgcgggtcgaaattatcgatggccttgatcagcccgatgcagccgacctgaaagaggtcgtccgggttctcgccgcggctcgtaaagcgctggataacgctgagcaccagccgcagattgccgtaaatcagcttgtcgcgcgcggctttgtcgccgtgccggctgcggtccagcagctcgcgcatctcgtcgtttttgagtgtttgcagctttgcggtgttcacgccgcagatctcgaccttgctctgtgcataagcgtacataaaactctacctccgaacaaaaagtttgtccggaggtagtatgcgccgcaaaaaggcggcttaatccacaaaaggaaaaatcacgccggcataaaattctgcgcgccgcgcataaaatagcctgatacaaaatttggacggaggcggttttatgctgacaagaatcggggacatgcgcagccgcgaggtgatcagcgtccgcgacggcgcgcggatcggctatctcggcgacattgaaattgatacggcgagcgcctcgctcgcggcgatcgtcgtgtacgggcgctcgcgcttttttgggctgttcggccacgaatccgactgcgtgatcccgtggagcgacatcacaacgatcggcgaggacgcggtgctggtcgattacgcggtgcccaagcgcgcccaaaagcgcagctttctcgcgagcttttttgaaaacggatgagcggcgcacagcgccgcaggcggatcgcctgaacaggcgctaccaccagtcgtaggattccggctcgagcagcgtggtctcgccgccgcaggcggcctgcatcgtgaagagctgctgcacggaatcttccacggtgaagcggagcgtgccggacaccgtttcgccgggggcgacggagacgtcgtacagggaatcgtagctgccgctctcctcgggctggaacgtcaccgtattgttctcgatcagagtgaactgcaggttgtctcccgcggcggagggcgaaacggcgagcgtttcagcgcttgtgtttgtgatgctcatggcaaaaaaatggtagtgcgtcatgggctcgcccgggatggcctccgtgtagtggccgtccatccggatcttccacgggccgaaggaggctgtctcaccgaacggcaggggattgccggcggctgaggtgacgaaatagtcggtcggaccgtccgggtcgtacacgatgcccccgctctctgaagtttcgctttctgcgggcgccgcggtttccgccggcgcgctttcgggggaaccgggggcttccgccggcgtgctgctctcctgcgcatcggtcggcgcgggcagcgccatgtcgagcgtttcgccgtccttcacgatgcgcagggagaattccccgctgatgtccttcggaacggaaaagacgaggtcgccggtgcgcgtgctcagcgggttcaccgcggcgccgaccagcgtggtctgcgcgccgagcaggtcggagggcggatattcgtattcgccgttatagatcagataggccgtgtcctgctgcgtgcggaacgaagtaagcagctggtcgctctgtttgccgaggtttttgaccgacaggctgacgacataatagatgctgccctcgtccggttcgtagtacagcaggttgtattcactgtccgacatcgagtaggtctcctgcgtcgtcaggctgtttgcggtgatctcccagtcgccgagcgcgccggtttcgccggcaggcacggcctcgggaaccggttcgggcgttgcggcggcctgcggtgtgggggaggcggacgcagtgctttcggcggtgctctccggcttcgcggcagagcagccggagagcagggcgcaggccgcgagcaggcaaatcccggtgcgcagggcgttttggatggtcggttgcataaggcttcatctcctttgtgaaaattgtagcatcccgccgccaaaaagtaaagaagaatccggaaaacagagggcggcgcgcgaagcggcggcggaaaagcaaaaaaacgcaaaaaataaagcggaaaaggcttgatttggcggccctgctgtgctataatatttcagcgatttgcagaatctgcaagcaaaaacgcacgccggagccctcggaacggtgccgcacaggcggttttttccgaaaatacaggcccggcggaggaaaaaccaaggaggtattttcaaatggcagtagtatctatgaagcagcttctggaagccggcgtccatttcggccaccagaccagaagatggaacccgaagatggcgcagtacatcttcacggagagaaacggcatctacatcatcgacctgcagaagaccgttaagaagctcgaggaggcgtacaactttgtccgcgacctctcgatggagggcaagaacgtcctcttcgtcggcacgaagaagcaggcgcaggaatccgttaaggaagaggcgctgcgcgccggcgcttactatgtgaacgcgcgctggctcggcggcatgctcaccaacttcacgacgatccgccgcagaatccagagactcgcccagctgcgcaagatgcaggaggacggcacctttgaactgctcccgaagaaggaagtcatcaagctcgagctcgagatcgagaagctcgagaagttcctcggcggcatcaaggacatgaagtctttcccgggcgcgctctttatcgtcgacccgagaaaggaaagaatcgctgtttccgaggcgaagaagctcggtatcccgatcgttgcgatcgtcgatacgaactgcgacccggacgagatcgattacgtgattccgggcaatgacgacgcgatccgcgctgtccgcctgatcgccggcgctatggcgaacgcgatcatcgagggccgcgagggccagatgggcgccgccgcacaggagaccgaggaaaaggccgaggccgaagcgtaatttacccttaaataaaatcgtttactccgaaaacaaccggaaggagaaaataaaatgagctttacagcaaaagacgtcgcgacgctcagagcaaagaccggctgcggtatgatggactgcaagaaggcgcttaccgatgcgaacagcgacatggaaaaggcagccgagctccttcgcgagaagggccttgcggcttccgttaagaaggcaagcagaatcgcggcggaaggcgttgcatttgcaaaggtctgcgactgcggcaaggtcggcgttgtcatcgagatcaacgccgagacggacttcgtcgcgaagaacgcgagcttcatcgagtttgtcgagacctgcgcggataccgtgatcgacgagaacccggcagacgttgaggcgctgctcgcctgcaaggcgcacggctccgatatgacggtcgacgagatgctgaaggacaagatcctcacgatcggcgagaacatcaagatccgccgtttcgtccgctacgagggcgactgcgtcgcttacgtgcacggcggcggcagaatcggcgttctggttcgctttgagacggagaacatcccggccgaggtgctcggcgagtgcggcaaggacgttgcgatgcagatcgcggcgctcaacccgctctatctcgacaagtccaccgttccggcggaggcgatcgagaaggagaaggaaatcctgatggcgcagatccagaacgatccgaagaacgcgaagaagccggcgaacatcatcgagaagatggtaaccggcagaatcggcaagttctacgagaacaactgcctcatgcagcaggcgttcgtcaagaacggcgaagtttctgtggagaagtacctcgcagaggaagcgaagaaggccggcggcacgatgaaggctgtggagtttgtgcgctttgaaaagggcgagggcctcgagaagagaagcgacgactttgcaaacgaagttgccagcatgattaaataagaccggtgcccgcggcgtaaaatccgcgggcgctttcttactgcaaaacggtgcccgggtattgtggggatactgcgcccgggccggaaaataaggaatggtgaaatcaaatgaaaaagatcattcagggtaaggtccgcgaggtttatgagatttccgacaaggagctcgtcgtcgtcacgacggaccgtctctccgcgttcgacgtgattctgccgacgccggtgccggaaaagggcatcgtgctcaacaagctctcctcgttctggttcaacctgacgaaggacatcgtcccgaatcatatgatttccgaggacctcaaggatatgccggcggagttccaaaagccggaattcgagggccgcacgatcctcgtcaagaagctgaagatgctgccgtatgagttcatcatccgcggctatgtgttcggcagcatgtggaaggcctacaaggccggcgagccgttctgcgggcacaagatcgagggcgattacaagctcgcgcagaagctggagaagccgatcctcacaccgtccacgaagagcagcgagggccacgatgtcaacatctcgatcgaggagatgaaggccgacgtgggcgaggcgcttgcagagcagatcgaggacgtctgcctgaagctcttcgacagatgctgcacgtatgccgctgaaaagggtatcatcatcgccgacacgaagctcgagttcggcctcgatgagaacggcagtctcgttctggcggacgaggtctttacaccggattccagccgcttctgggacgctgcggactatgaagtcggcgtttccccgaagagcttcgacaagcagtttgcgcgcgactggctgatcgagaacaagctcgacggtgtcacgccgccgccggagcttccggccgagatcgtcgaaaaaacgcgcgacaagtacatggagtgcatgaagcgtatcgtcggctaaccggcataaaaccgcataaaacaaaaacggctgtctccgaagcgggggcagccgtttttgcatcgtttggtttttaaaaccgccgctggctttcagcgtgccggcggcggtctgtgttcagtcgatataccgcgtgtggaagatggcttcgccctccatgctgtagagctcgtcgcgggtgatcgtgcggccccaagagatccggcagttctcgtagtcggcgttgacctcggtgacggtgattgtgtccgtggaccagtcgatgtccgtcacgatcatggagtgttcgttctcgacgaggcgaatatggtcgccgatgcgcaggctgtcgaaatcatagaattcggtgacgggcgcgtcggtgccgaaaagcaggtcgctgatcagggcggcgtagccaaggcactgcgtgtcgtagtcgtactgcgggaagtaatccgatatagcgccgttgtaagtgttgcagtagtcgtagccgttttcgctgtgggcgcaggcctgatcggtgatacagagggcttgctcccaatcgttcatcgaggaggcgtccatgccgtaatggttccagtagcggccgtcctcaaaatatgcggcgagctgctcgagttcgagcaggacgtgcgtctcggtcagctcgtccaccgtttcaaacgatgggacggcgacttccagctctgcgcgggagatgtaagcggttgctgcggcatcgtccggggcaatatagactgcggcggaggcatccggcgatgacgcggagctgtcgggtttgccggaggctgtgccgtctgccgcggagacggcaggcgcgctgctgcccagccgcggcacggcgaggccggcggcaaacccgatcagaagaaacagcgccagcagcggcaccgtgagatttcgcttgcgccgggcggcaaaatgagagcggttaggcatttcgatcgtcccttcacgttttataaaaattttgtcacctttagtataaaggagagacatgaacaaaatatgaatttttccatgataaagacttaaatttattcgggctgggtgggaatccggatcaggctgacggagccgggtacgagcggaaccgcatttccggaggcagccacactttcctccagcacacagctctgcgccgcagagcaggacgcgtgcggcggtgcggaaaggcgcgttacggcgaccgtgcccgcaaagccgaggtcgagcgtgcaggcgttttcaaaatcgcggttgacggcggcgaggtgcaggctgccgtccgcctgccggagcgcgcagagattcagcgcgtcgatcctgccggccggcgtgtcgagcaccggcggcgtgtattcaaccggcacgcggctgccgagcatcatgcggcggtaatggagcaggggatacgcgatcgtctgataataggcgcctgccggatcggctaggatcggcgcgatcacgttgaccatctgcgccatgttcgcgatctccacggcctcgcaggctagaatatcgttgagcgcgctcgccacccaaacggcatcgcgccaagtgtagacggcatccagcccgtaggtttcgctgctgttgctgttccagatgttccactcgtcaagcgcgaggcgcagccggccgctgcgcggcggaaagcggtaccatgggctgaaatccgtgacggtctccgggtattccgcgagcaggccggagagcgcgccgagcgcggagacgagctgcttctcgccggcaaacggcccgtaaagcccgcggcccgcctcggcggaataatggtggtaggagaggtaatcggccatcgggtgcagcgcgtcgagcacggcgcgattccacgccatgtcgtcgcagccgacgagcacggtcttgattgcagggtcgttcagcttcataaatttgatgaattcgcgcgcgtcgcggatatagacctgtacatcgttctggatgccgatgtccggctcggcgtagcattcgttgccgatgcaccagtatttgacgttgaagggctcgggatagccgtgcgcacgacgcagcgcggcatagtggctgtttccggtgccgttgcagtattccacccagttgccggcctcctccggcgtgccggaggccatgttgacgcagatcatcggctccgcgccgagcctgcggcagtaggcgacgaattcggccgtgccgaagcccgggtcgatttcgccgccccagatgatattgcggcggcgtctgcgcgtctcgagcgggccaatggcgtcctcccagtggtagaggcacatcacggtaccgccggggaagcggaggatcggcggctgcagcgcttccgccttttcgagcacgtcggtgcggatgccggcggcatctgcaaactggctgtccgggtcgtatatgccgccgtcgatgcagttcagcaggtgctcgatgaactggccgtagaccatcgggttcacggggctgccggccggaccgaagcggacgggaatggtgttttgcataggaaaatcctctttttctgtgttgttttaaacagtgtaccacaaaagccgctgtgaaacaagggccagcggcaaaatccgcgccgcacggcgtcggttccgtataaaagatcggcggacgcccaatctaaaagaaaaagaaggagtgagcagaaatgccgcaaatgttttgctttcagtgccagcagacggcaggcaacaagggctgtgtacgcacgggcgtctgcggaaagcaaccggaaaccgcccgcttgcaggacgaactggtgtatgaattgattcgcttggccgaggccgtggaggaaacaggaaagcgcacccgcacagcccaaagcctcatggcggacggtctgtttacaacgctgaccaacgtcaatttcgacgacgcggcgatccgcgcgtttacggaccgcgttctggccgagcgccggtcgattggcggcggggtgtacgaggctgtcgagctttggaaaggggagacggacatcgtttccctgcgctcaacgctcttgttcggtatgaagggcatggcggcgtatgcgcaccatgccatgcggctcgggtattgggatgaggacgtcggcgcatggttcagcaaggggctgtgcgcgctgaaccgcgaccacaccgtggagaagtggctcgcgctgctcatggaattcgggcgggtgaactaccggtgcatggagcttctggatgaagcgaacaccggaaaattcggcacgcccgcgccggcgcgcgtcaatacgggcatcaaaaaggggccgttcatcgtggtctcggggcacgacctcgaagatttggcgcagcttctcgagcagactgccggaaaggggatcaacgtttacacgcacggggagatgctgccggcgcacggctaccccgcactgcggaaatacccgcatctggcgggaaatttcggcacggcctggcagagccagcagaaggagctggagggcattccggcgcccatcctcttcacgacgaactgcctgatgccgccgcggccgagctaccgcgaccgcgtgtacacgacctcggtggtcggatacgagggcctgcggcacatcgccgcagatgaggcggggcataaggatttcaccccgctgatcgagcaggcactggcgctcggcggctatgtgcacgaccacagcatgagcggcattaacggcgggcatatgctcacgaccggatttgcgcacggcgccgtacttgcaaatgccgaaaaggtgatcgaggcggtcaagagcggggcgatccggcacattttcctcgtgggcggctgcgatggtgcgcaccccggccggaactactatacggagtttgtgaagcagacgccgatggacacgcttgtgctcacactggcctgcggaaaataccgcttcaacgatctggatctcggcgagatcggcggcctgccgcgcattttggacatgggccagtgcaacgatgcgtacagcgctatcaaggtggcgttggcccttgcggaggcgttttcgtgcacggtcaacgagcttccgctgacgctggtgctctcttggtacgagcagaaggccgtgtgcattttgctgacgctgcttgcgctcggcgtcaaaaacatgtatctcgggccgactttgccggctttcatgtcggagacgatcgttaagacgctggtagacgtctacggcctgcagccgaccaccgcgcccgagcgggacatggacgcgattctccgccgcggctgaccacaatccccggctgggaatgcggtacggcccgccacaatataagtgaccttaaaagcaagaggcactgtcggtgcagtttaacccggcagtgccttttattgcgggaatttggttagaaggcgttaattcccaaccgttgttcatattgacagattggaagatcacacttaatattctaaaaatcgactgataaataaatttaaatagttgactgtatgaattaaatacagtataatagctccggattgcagggcggatcagacggggaacgggcagctttggacgaaggtgagattccaatatttgaggtcagccggagtttcagattgcttgacagacctgcggtatctctttgcccggtaaaacaggaatgaaagacaacaggagtgggtggaaatgaagaaagttatcgcagttgttttggcgcttgttctgggagccggcttggccggatgtaccggcgggacagcggccgatcccgaaatgtcgccttcggccgctgcatcggcctcgccgcaggtgaaagcggccgaaacaccgaaagcggcaaggccgtctgcgtcgcagtcggcaaaggaaacggctgcaccggaaaaaacagaatccgaagtatcgggcacgcgtgtcagggccggtgcacaggatacacaggtccaaacctcagcggaggaatcagccggtacgcgggagccagcggaaacaaaacagccggcggtaacggccgcgccgaagccaacaccggttccgacggttgcaccgactgctgtgccgacggctgtaccgacgccggagcccacaccagagccggtttttacaccaaccgaggcgccggagcagatacccgatgatgacccgcagggggaggtatggattcccacgaacgggggacagaagtatcacagccattcgggctgcagcaatatgatcgatccgcgctatgtgacgatcagcgaggccgaggcgctgggttttacgtcgtgcaagcggtgctacggatgatctgaaatcagaataagcggacaacgcgcgaagcgctccggaggtttggcacagaatgccgagcctccggggcgcttttgatttttcgggaatatgctgctgtggggcgtctctctgcttttctgaatcgattccgcaaaagaggcggcgcagccctttgccgttatgctttctccgaccgaattaagttgcttacatagggccgttttcccgaaagaacttcgtcgtagaaggtctgcttccattcgatataggcggcgctctcctccagctccttgatcgatgcgcgcagggcttcctgctttttcgccagcatttccttgcgcggcaaaatggtggattccccctgaaggcacagcgccagatagtccttcatctcttgaatgctcatcccgcatttttttaagcaggtgaggtcccgtatccatcttacatcctgttcatcgaagatccggcggttgttttcatcccgcttgacatgggggaccagcccctcgttgcagtaaaatttgagcgtttgataggtcatgccgagttccctgcaaacctgcatcatggtatacatcagcggagcacctctttctgtgtttacaaaaaattcattattttcttttgaaaaacgcttgaccggttgtaacaaccggaatatataatcggaagtgaaaagcggttgtggtaaccggattatagcacagggtactgaaaaaagcaatgggcagcgggcggaaacagcggataaaagcgccgcctgctgaacccccaaaaatcccgattcatttcaggcaataacaaaggagtgtttttcaatggacaaagacgtactgaaaaaggcacaggatgttttcagcgaaagctgggagcggctggcacagaccgacccggagtttctggaaatcgccgctaattttgcacagggcgaggcggtgcaggccagcaaattaaccgagaaggagcgtatgctctgcgttttatccgccctgctgggctgtcagggcatgggggcgttcagaaatatgctgcataccgcgctggatgccggaatcgagcctgccgcggtcaaagaggttctctatcaggcggcggcttatctggggatcggccgggtgcacgattttctgcttgccgcaaacgaaatcatggagcggcacggtgtccggcttcccctcgcgccgcagagaaccaccgacgaaaacacccggtttgaaaaagggctggccaagcaggtagcgctgtttggggagcggatggcaaagcgccagacggatgcgccgcccctgcgccgcaacatcaaccgctggctggcggacaactgcttcggcgattactacatccgcaccggcctgaacgatcgggagcgggagctgatcaccttctgctttattttggcgcagggcggctgcgaaagccagcttcgtgggcatacagcgggaaattttggcgtgggaaacggaaaagagcggctttacagcgccgtggagcagtgtatgccctacatcggctacccccgttccttaaatgcaatggccgtcatcgacgagatcgccgcaaaagcggaataaaaggaggaagcattgtgcagacaatcacattacaaaacggactgaaaatgcccatggagggctttggcgtctttcaggtccgcgacaaggaagaatgcaagcgctcggtactggacgcgattcgggcaggctaccgtttgatcgataccgcggcctcttacggcaatgaggatgcggtgggcgaggcggtgcgggaggccatcgcggaggggctctgcaccagagaggagctgtttatcacctccaaaatgtgggtgcaggatatgcagagctatgaaacggcggaggcggccatcgacgcctcgctggaaaagatagggctgcaatatctggacctgtacctgctgcatcaggcgatgaaggattatttcagcgcttggcgggccatggaggatgcttaccgggcggggaagctgaaagcgatcggcgtgtccaacttctaccctcacgtgctgacaaacttctgcgaaacggtggaaatctgcccgatggtcaaccaagtggagcttcacccctacttcacgcaggaagtggcgctggaaacgatggcgcattatcagatcgttccggaggcgtgggccccgttgggcggcggccggtatcggccctttgaggatgaaatgctgggaaaaatcgctgaaagccacggaaaaaccatcggtcaggtcattctgcgttggaatattcagcggggcgtggtcgttattccgaaatccacccataaggagcggatcgaagagaatatcgatatctgggattttgccctcacggacggagaaatgcggcagatcgcgtctctggatcagggatataccggcacggcggtcaagcactttgacccggagtttgtccgcatgtgcaatactcgaaaaattcacgattaaaaggaggctgcggcgatgaaggaatttgtgttttctcatcccacaaaggtttattttggagagggcgcggcagaaaaggcgctgaaaacagagcttgcccatgccggcgatacggttatgcttgcctatggcggcggttccgtgaagaagaacggcatttacggtgaaatctccggcattctgcgggcgctgggaaagagggtcgtcgatttttccggcatcatgcccaatcccacctatgcaaaggtgcaggagggcgcggcgctggcaagaaaagaacaggtggataccatccttgcggtcggcggcggctcggtcatcgactgctgcaaaatcatcgcggcgcaggcgaaaaccgaagaggacatctggagcatggaatttgtccggcacaagctgcccgcagacgcaattcccctcggcgccgttgtcacagcttccggcacaggcgcagagatgaacggcggcgcagtcatcaccaatgaggcgctttctgtcaaaacgggggtctttggctttgcgccccgctttgcggtgctcgatccctcttataccctgtcggtccccttcatacaggtgatttccggcgctttcgacacgctcagccatgcgatggagacgtatctcgggcagtcggatcaggacaatgtgtcggatgatgtagcgctggcggtcatgcggaatacggttgtcaatatgcgccgcctgctgaacgataaagacgacctgcaggcccgcggcaacctgatgtgggattctgctatggcggaaaacggcgtcctgaaggtgggccgtctgaccgattttcaggcgcatcagatcgagcaccagctcggcgcctacactgactgcaatcacgggcagggcttggcggtgatccatccagcctactaccgccgtatcgtaaaagacgcggaagaaaaattcgcccgctttgcccgcgcggtatttggtgcggataccgccgaagccggcgttgaagcgctggcggcgtttatcagggaatgcggcttgcccacaaggctgggggaactgaaatccaaggtggagatcacgccggaggtactgcggaaggtggcggacacctgcaatattataaagagcggcccgcgcgagctgagccggaatgaagtttatgaaattctctgcgcgtgcctgtgaggcggcgccgaaatcaaagaaagtgagtaaacgacgatgttcaaaaaaatccttggcctgacgatggccgccgtgctggtcttttccctctccgcctgcgggcagacacaggcggaaagcagcaggccggcaggcgcctccgaagctgccgtcagcagtgaggcgcaggaaacatccgcatccggcgaagcagaaacggcttccgcctctgagagcgaaccggcggaagccggtgcgggaaataccttggttgtgtatttctcatggtccggaaacacagaggaaatggcggcctatatcgcggagcaaacgggcggcgatctgtatgaaatcacgccccaaacgccctacccggaggactataacgaaaccgcggaaattgcggaaaaagagcgcaatgaaaacgcccgcccggcgatggccgatctgccggacgccatcgatcagtacgacaccatcgtgctgggataccccatctggtggcataccgccccgatgatcatcggcacttttctggagagctgcgacctgaccggcaaggagatctatccgtttacacagtcgtcctctatggatgcggagcagttcgacaattccattgcgttcgtccgggagaacgccggcggcgctgtcgtacacgacgggctgtttgcaaggccctctgataccggcgcgatcgacgcctacctctctgaaaacgggcttacagcgtaagcgtcccgccgcatgcctccgcggcttaacggaggacggctttaagggccggatgaacggaagcccatatttctcgaaacgggagaggcatgcagtctgtttctcacagactgcatgcctcttctgcgcctagagagccgcggccttgccggcgggaaggcccggtttcaatccgcctcatccgcctgctctatggcgggtatgtccgatgctgacggtttgaccgtgacatagccggacgctgccgcgctgagcgggcctttggagaaggtggattccctgcctttaccggtgtcctgtccggctgtgccgtctgcccgcggctttacgtccagcttaaatcgaatggcaccctgatcgacggagagcgtcggaattggaacaatgccgaggaagggggaactgggattccgcgctgttttggggcgcggcgcgctccgtctcttctgtgttgggatctgcaggcggcttttcgtctggcattttgagcctcctttttgatgatacgcatccgctgtgattttgtgctgatccgccgatggagtgcggtgcaaaagtgtccggcggcacggcgataccggtatcgctagacctgcgcggcggtctgccgcagagcctccaaaaacagctccgcggccctcgagaatacctgatactttttccacacgacgcagaggccggcctgcagcgggggagaaagcggcttaaagcacaggctggtcccggttgtgttgaggattttatccagcgtgatcgcatagccgagtccctcgtccaccagaatggaggcgttgtacagcaggctgtacgtcgcgacgacgtttagatcggcttctgcgcatccgaaccacagggcgagggcgctgccgtactggcgggagaggatcagcggcttgtcccgcagcaggtccggccgcatcgcttctgtgccggcaagcggggaatcgcggcgcatcagaacgccccacgtgtccttctgcgggatgcgaaggtggtcgtaccgcgagagctctccggggtcgaagagcagcccgaaatcgaccagcccctgatcgagcttgtcggtcacgtcggccgtgtctccgctggaaatgtgcaggcggatgcgcgggtgtgttttttgcagatgcacggcggcgcgggcgagcaggcggatggcgtcggtttcgcccgcaccgatgtagacgtcgccggcggcagcggcgtcgcccagcgcgatttccgcttcggttttccggacgagcccggcgatctcctccgcgcgctttcgaaggagcatcccctccgccgtgagggtgatctgccggtttccgcggacaaagagctgtttgccgaggctttcctccagctcccggagctggcgcgaaagcgtcggctgtgaaaggtgcagcgattcggccgcgcccgaaatgcttcgctcccgcgccacggcgagaaagtattgcagcacgcgcagttccatttgaacccaccttcccagaattatttcggtctctcgcgttcatgctttcgtatggctttaatatagcatacggggacgccgttgtaaagcgcaggctgaaagcaaggtaccgcagcttgaacagaatgccttgaagcgagcgggaaaatcggttatactaagcgcagacggacccctgcgcatgtgccggactgcgggaaaagccggatacacggaggtttcagtgtgaaaaatactttttcacacatgatttgtgcctttgccgcgatgagcaaagcggcaatcggcttcgccgaccggcacaaaaaaataaggagtggtgatttttatgctttatacaagccgatacgattcgccgctgggcggcattctgctggcgggggacgacgaggccctgaccggcctgtggttcgacgggcagaagtattttgcggatacactgccggcgcagcatgcggcgcgcgagacgccggtgtttgacgcggcaaagcgctggctggacgtgtatttcccgggtgagcggccggactttacgccgcctgtgaaatgggaggcgacgccgtttcgaagcgcggtctgggaaattcttgtttccgtgccctacggcacgacggtcacctatgcggaaattgcgtcccgcatcgcgcggcagcgcgggctcgcgcacatgtccgcgcaggcggcgggaagcgccgtggcgcacaacccgatttccgtgatcgttccgtgccaccgcgttgtcggcacggacggcagcctgacgggctatgccggcggcatcgggaaaaagctgcgcctgctggagctggagcgcgttgatacgtcgcgcttcttcataccgaaaaaagggacggcgctgtgattccgtgcgccgcggcacctttgcgggcgttcgccggtgcgaaagcggaatcggcgcgctgtgggcggctcggttgcgcgtcccgccgcacggtgcggcagtctccggctttggccgcggagctgcgcgcccactgttttgtcgaaaaaaagcggcggcgtccgcacgatttttagccgctgcgcagaaatttttgaaatgtgcgccgcagacggcggcgggaattgacttttttcggcggcaggcctataattggtactaccaattatagcttgggggctgtatccatgaagtatctgaaacaattcgggatcattctgggcttatcgctgctcggggagctgctgaattacctgatcccgctgccggtgccggcaagcatttacgggcttgcattgatgttcctctgcctgcatttcaaggtgatcaagctgggcgacgtaaaggaaacggcggtctttctcatcgagatcatgccgctgatgttcatcccggccgccgtcggcctcgtcaacgcgtgggggatcatccgctcgaacctgctcgcctatgcggtgatcaccgtgctttccacagcgctcgtcatgctcgtttcggggcacgccacacagcttgcgctgcggcgcggcggcagacgggaggtggggaaatgagcttttttgaaaactccgttttctttggcgtcgtgatcagcctgctggcctacggcgccggcagcttgctgcaaaaccgctttaagctggcgcttttcaatccgctgctgatctccgtcgccgcgacgatcgcggtgcttgcggcggcggggatcgactacgacgtgtattattccggcgcgcagtatctgagctacctgctcacgccggagaccgtgtgcctcgcggtgccgctctatgaaaagcttgaggtcctgaaaaagaactggcgcgccattctgatcggcatcgtgtccggcgtcctgacgacgctgctgtgcatcctcgcgatgagcctgatgttcggcctttcgcacgaggagtatgtgacgctgctcccgaaatccatcacgacggcgattggcatgggcgtttcggaggagctcggcggctacgtcacgctgaccgtcgcggtgatcatcattaccggcgttctcggcaatattttcgcgccgctgatctgccgtgtgtttcgcatacgcgaaccgattgcaaagggcatcgcgatcggcacgtcgtcgcatgcggtgggtacggcgaaggcaatggaaatgggcgaggtcgagggggcgatgagcagcctttccatcgcgatttccggcctgctcaccgtggtcggcgcgtccgtattcgcgcagtttctgtgaggaggtgcagcatggaggagacgacgcgcgaataccagcgggcgatccgatacctgtgcggatgtatccgcgacggctccatcgccgtcggcgaccgcctgccgaccgagcgcacgctttcggaaacgctgcagatcagccgcaattccacgcgggaggcgctgcgcagcatggaaaatatgggcatcgtggagagccgcaggggctcgggcagctattacaccgggaatatctcgaaaaagctctccgagatgatccgcacgcttctcctgatccggctggtttcgcaggaggagatctgcgcgttccgccgaacgatggaggtgtcggtctgcgtgtcggtgatcggccgcggcgattttgacctcgctgaggcggagacggcgctcgcgctgccggcggagagcgtagaagaggaggcgcggcaggacgagcgcttccacagcctcttggcgcaggcgtccggcaaccgcttttggatcgagctgatggatgcgctgggcgacgtctaccgcacatggattgaggcggtgctgcgcggcgcggacgccgagctgcgccgaaggctgcacgccgcgcacggcgcgatcctcgacggcttgcggcagagggatgcagcggcctgcacggcggcggtcaacgcgcactacgatctgatcgacctcgcgcttcggcggcaggcggcgccgaaggaataacggaatacagccggggcgtgcccttttggcgtttgggcggtgaaaaaccttgcggtcgccctgctcggtacagtcttgtccgggcgtgacggccgccgcggcatgtcaccgtttggcggtgcgggcggatacacagcggcgggtgagcggttcagcgcccgggcatcgatgcacgccgcgttttcagcgcttttccgcggtaagccggatccccgcgcccggcatagccctgctcttcctcaaaggtactgcccctgtattgcgcgaaagcatgaccagcaccgccttgcggtcccctcgcgctcagcgcctgaagcgccggatacccgaacgcagcgccgtgcggggcgcgaaaaaatatggctggatttagcggcagggcttgacatctctgccgatttccggtataataacttttgttatccggcctatggataatatttttggtcggaaaatttgcggtacatcttgacagctttgcgtgttttgtgctataatacaattcgcgttgaaatggagaggtgtccgagtggtttaaggagctagtcttgaaaactagtgatcccgcaagggaccaagagttcgaatctcttcctctccgccaattttatttttaagttttcactgttttggagaagtacccaagtggtgaaggggctcccctgctaagggagtagatcgggtaaccggtgcatgggttcaaatcccatcttctccgccagacctgcggtcagcaatttgcggccgcaggtctttctgtttttaagttctgcgcccgcgcttatggcggatatctatttcgtaacagtcagacaataagaaacgatgatttatcttcggatagcttgtcgtttcttttgctttttgcatggctttatttctgagagatcgttatctataatatggtatacaatgcgcatcgtctggtctcaaatcacagcaatatctgtttatgttcctcggccggagctgtggccggcaaactgcggccgtgtttctttctgtttctgcgtccgtatccggcgggctgcccgttttatatgccctgtacaagccgtaaaacaagcggtgcaggtgatgcttttcaggtgcgccgatgcttttggttttctcaaagccgctgattataaacaatcgataaaaatcatcaaatgcagatggaaatttacggcaggatatgctatactgaatctgaatacatgcagccgcggcggaattccgcggaaaataaaagaatcagataggagtggactgtatggatgtaaaagcaatcgtatcgcagatgacgctcgaagagaaagccgcgctctgctcgggcaagaatttttggcacctgcaaacgccggagcgcctcggcatcgagccggtcatggtttcggacggcccgtgcggaattcgcaagcaggccgacgcggcggatcatctcggtctgaacgccagcgtgccggcgacgagttatccgaccggctcgtgcatggcgtgctcgtttgaccgcgcgctgttccgcgaatccggcgtcacgctcggccacgcctgtcaggccgagcagctttccgttctgctcggaccggccgcaaatatcaagcgctccccgctctgcggcagaaacttcgagtatctttcggaggacccttacctgacgggcgagctcgccgcgagttacatcgacggcgtgcagagccagaatgtcggcgtcagcctgaagcactttgccgtgaacaatcaggagtaccaccgcatgtccagcgacagcgttgtggatgagcgcacgctgcgcgaaatctacctcgctggctttgagaccgccgtgcgccgcgcgaagccgtggacggtcatgtgctcgtataaccgcgtcaacggcacgtatgcggcggaaaataagcgcctgctcaccgagatcctacgcgatgaatggggcttcgacggctatgtcgtcagcgactggggcgcgacgacggcggagcgcgtcaagtgcctcgaggccggtatggatcttgagatgcccggcaagaacgccgcgaacgacaggcagctcgtcgaggccgtgcaaaacggcacgatggatgaaaaagtgctcgatacggcggcggagcgcattttgacagtcgtgctcaaatacctcgaccataaaaagccggaaaccgtcatcgactttgaggccgaccacgaaaaggcgcgcaagatcgctgcggaatcgatggtgctgctcaaaaacgacggcattttgccgctgaaaaaggatgcgaaggtcgcctttgtcggcgagtttgcgcgcacgccgcgctttcagggcggcggcagctccaatgtaaacgcttacaaggtcacgagtgcgctcgaggccgccgaaacgatgggcctgcacgtctcgtttgcaccgggctatgcgaccaaaacgccggagccggacgcggcgctgctcgaggaagccgcaaaaacggcagaggccgccgacgtcgcggtcgtctttgtcggtatcactgacgcgatggaatccgagggcttcgaccgccgcacgctttcgatgccggaaaaccacgaggcgctggtcgcggcggtctcgaaggtgcagaaaaataccgtggtcgtcgtcatgtgcggcggctgcattacgatgccgtggctcagcgatgtgcgcggcgtgctgtacgcgtatcttggcggcgaggcagtcggccccgcgacgctcgacctgcttttcggcgacgcgaacccctcgggcaagctggcggagagttttccgaagcggctggaggacaacccgtcctacctctactacttcggcgacgagcagaaccgcaccgaataccgcgagggcatttttgtcggctaccgctactacgataagaaaaacatcgacgtgctgtttccgttcggctacggcctgagctacacgacgtttgaatacagcgatctcaggctcgataaggcggagatgctggataccgacacgctgactgtaacggtcaaggtcaaaaataccggcgccgtccgcggcaaggaggtcgtgcagctttatgtcggcatgccgcagagccgcacgatccgcccggaaaaggagctgcgcggcttcgaaaaggtggagcttgcgccgggcgaggaaaagaccgtttccttcacgctctcgaagcgcgcgttcgcctattaccgcaccgacatcgcggactggtacgcggaaagcggagattatgtcatcatggcggcaaaatcgagccgcgacgtcgcctgcactgcgacggtccgcgtcacatccacgacggaaatcaagcgggtttacacgatgaattccacggtggaggagatcatggaaagccctgtcggccgcgaatttatcgggaagatgatcgcgagcagcgggcttgtgccgtccgacgcctccgagggcccgaacctcggcgagggtacggcgcagatgatggagatcatgatgcgcgagatgccgctgcgcagcctgctggccttcggcggcgagaatgtgcccgcgggactcggcgaaatgctgctcagccagttgaatgcctgacaggcggaaagggaggaaagcgatggaaacgattgtaagcgtgcgtgagggacggctcgagggctgccgctccgccgatgaaaaaagcataatttttaaaggggtgccttacgcggagccgccggtcggcgcgctgcgctggaagcgcccgcagccgaaagccccgtgggacggcgtgcgcccggccaaggaattttcggcgaaggcccatcaggccgatttgacgcgcgagggcttttacgcgaaggaattctataccgacgagcggattgagcgcagcgaggactgcctatacctcaatatctggacgcctgcgggcgcgcagccgggggataagctgcccgtgctcttctgggtgcacggcggcgcgtttctgcacggctgcggtgcggaaaaggagtttgacggcgagcagtttgcgcgaaacggcgtgatcctcgtcacaatcaactaccgcgtcggcgcgctcggctttttcacacattccagccttgcggcggaaaacccggaggggatctgcggcaactacggcatctacgaccagatcgcggcgctcgagtggtgcagggcgaatatcgcggcctttggcggcgatcccgaaaacattacagcggcagggcagtctgccggctgtatgagcgtgcaaattttgatctcctcgccgctgacaaaggggaagctccgccgggcgattctgcaaagcggcggcgggctgaacggcctgagccgagatttttcgctcgaaagccatttggaagcctcgaaaaggctgatggaagcgctcggcgcgtcgaccatcgaggagatgcgcgcaattcccggcgagaaaatcgccgaggtgcagtacacgatcacctccggcgacggtctgtgctggacgccgattgtcgacggcgtgctgctgaccgcgccggtcgatgacgccgcgaaagcaggggcggcgcacgacatcgattatatgatcggctccaccggcgacgacatcggcgccgatacgcgccgcctcgaatacagcgcggtgtactgggcgcagaaccagctcgcgctggggcggcggccggcctatatctacttcttcgaccgcaagctgcccggcgacgacgcgggcgcgttccattcgtcggagctgtggtacgaattccacacgctcgaccgtgcgtggcggccgtgggagccgtgcgactacgcgctggaggcggcggtctccggatattgggcgaatttcgcgcgctgcggcaatccgaacggcgatggcctgccgcattggaggccgtatacggcggaggcgccggtgcagatgcgcctcgcggaaacgatcggcgaggaaaacgccgtttccgtgaaaggctgatttttctgcaaaaaccccttgacaagtgccgccccgactgctataataacacttgctgggcgcgagtgctggaattggcagacaggcacgtttgaggggcgtgtgtttatgacgtacgggttcaagtcccgtctcgcgcaccacacaaagaagccgcggcagatctgattctttcggatttgccgcggcttttcttttgtttttgttaaacgatcgcaaaatagcacagggaaggaggcgcgtttgtgcgccacgaaacgtatatccgtgaggtgccgggggcgcggacggcggtgctgatggtgcacggcattctcggaacgccggcgcattttgcgccgctatatccgcagattcccgcagactggtcggtttacagcattttgctcgagggacacggcggcaaggttgaggattttgccgcggcctctatggcggcttggcaggcacaggtgcgcggctgggtggagaagctgcgccggaaatacgcgcgcgttgtttttgccgcgcattcgatggggacgctctttgcggtgcacacggctgtctgcgacccggaaaatatcgccggcctgtttctcttgaatgtcccgctgcgggctggcgtgaagccgtgtgccgtgcgcaatgccctgaaggtcgctctggaccgcgcgtcgcccgcagatcccggcgcatggggaatgcggcaggcatacagcatggcgccggacggcaacctcctgaagtacctgcgctggattccgaattatatggcgcttctgcgcctgatgcgcactgtgcgcgcggaaatcggccggatcgcagtgccctgccgctgcttccagtccgcgcatgatgagcttatcgcgcgcgcctgcacaggacttttgctgaaaaatccgcggatctgcgtcgagaacctgccggaatccggccattttgcttacagttgtgaggatcaagcgcggatctgcgccgcattttcggatttttgccgtgagatcggccatactaaccgcataaaggagtgattggtatgatcgaacaggatacggtgcgattgctgcgcgagtgcgatgccggcatcaaaatgggaacggcctcgatcagcgatgttctgccgcacgtgaagggcggcgcactgcggcagtacctcgaggattgcagggcagagcacgaaaagctcggtacggagattcagggcatgctcaaccgctaccacgatgagggcaaagcgccgaacgcgatggcaaaaggcatgtcatggatgaaaacgaacgtgaagctcgcggtggatgattcggacgagacgatcgccgacctgatgacggacggctgcaatatgggtgtgaaatcgctcaaccgctacctcaacgaatacgaggcggcggaggaacgggcgaaggacatcacgaagcggcttatcaatctggaggaaaagctcgtgacggatatccgcggctttctctgaacaaaatacaaaaaaatcggggcactgtgaaaaacagcgtcccgattttttgctgtattcggcgggggttcagcttttgtcctgcatgacagaggcgatcacgccgagcagctcgcgcgtggtatctgcggcgtgctcccagtacatgacgccgagcaggcccttttcctttgtgtatacgcacttgcggcgcaccgcctcgggcgactcaaagctgatgaaatcgctgccgttccagaggtacgaggcttcggcgtccgcgtcccaatactcgataaaattgccggcacggcggaattcctcggtcaaatccttatactccgggccgtattcgccgacgctgcctgccggctgcagcaggccgttgttgacgttcggcacgccggagaagctgcggccgtagaacgcgacgccgacgatgagcttgcgcagcggcacgccggcgctgtggaacaggtcgacaatgtagcgcgtgctggtcttgtcgtcgtctccattcgaagcgccgagcgccgcgtggtggccggcctgcgtcgtagcgccgttgcgcatgtcgtaggtcatgagctggacgtaatcgacgatctccgccactttatccatttcggtgtcgcgcacgaagtagtcgccggcgccggccgcgagcgagacgatgcggttttggccgagcgcatcgcgcagcgcctgcaaaagcgccgtgtagttctccctgtcgcgcgggtcggcgtcgatgccggccgaatcgctgcaggggtactcccagtcgatgtcgatgccgtcaagcccgtgcgcgttgacgtaatcgaggcaggaggccgcaaaggcgcgccgtcccgcgtcggtcatcgccatcgtcgagaagccgcccgcgccccagccgccgacggagagcacgatcttgaccgccgggttccaacggcggaactgctcgatgcagccgatgtttgtgagctggtgcgtgtcgagcaggccgtccttgatgaggccgaaggcgagattgatgtgcgtgagcttcgagacgtcgtcctgcgtcacgtccggcattttcgggtttgtgatgtagccgatcgaataatattccataaaacacgattcctttccggttcattcctgctcttattatagccaatggcgggcgggaagtcaaccgtttgcatcctgcgggcgttgtgctataataggggcaaagggggcgatgaagatggagtttgacgcgatgctgcgggcggttctggagcaggtgcgcgccgcgggcattccggccgccgcgcagatcgacccgcaggtgcggctgaatacgcgcgcaaaaaagcggtatgggcgctgcatctgcaaaaatgggcggtatgaaatcgagctgtccgcgcatctcgtgcatgcggacagctcgtttgtgtataccgttttggcccatgaggtgctgcacacctgcccgggctgcatgaaccacgggccgctctggaagcagtatgcggcgcggatgggggagcggtatgggtattcgattgcgcgcacggcgcagtatgcgctggtgcccggggcgccgcgcgaagcgccgtatctcctgcaatgcgcggcctgcggcacactgtttccaaggcagcggatgagccgatcggtccgcgagccggggcgctaccgctgccggtgcggcggcaaactgctgcggctacgctgaaagcgtgatgccgaagaagcgctcggcgttgccgtggcagatcatttcgagctccgcctcggagagcccggcctgccggagcagcgcgtattcggcggaaacggtgctccatgggaaatccgtggcgaaaaataccttgtccgcgccgtgctttcgaatcagcgtgccgcagcgctccggcgtgagcgagcgcgtcgcgaaggcggtgtcgagcaggatattcggcttgccgatcacatagcgctccacgtccgcgtccatctccatgccgcccatatgcgcgccgatgatctggagcgcggggaagcggcctgcgatttcggcgagcatcttcggcgtgcagtgcacgacttccggagaatacgggtcgcgcccggcgtgaaagacgacgggcaggccgagcgcagcggcggcctcgtagaccgggaataccgcgggatcatcgacgaaaaattcctgatagtcggggtggaatttcacgcctttgagcccgagtgccttgatgcggtgcagctcgtccacggcgttttcagctgtagggtagacgctgccgaagcagtaggcgtttcccttttggcaggcggccgcgaaattgttgacggaggtcatctgcgacggcttcgtcgcgatatgcaaaatcataaatcccgcgcacccggcggccgcggcctcctcgcagaggctgccgtaggtgccgtcgccgtggtaggcgcagcggctgatctccgcgaggcgcggcagggccttcggtgcaagcgcgtcggggaagcaatgggtgtgcatgtcgaatatcagcatggaattctcctttcggcgggcatgcgcccgaaaagtaaaagggagacttttttgaaaaagtctccctcgtaaaccgtattgcctgcgaatcagtcgctgctgaagggcaggagcgcgaggtgacgagcacgcttgatagcgaccgtcaggccacgctggtggtgtgcacaagttcccgtaactcttctgggcaggatctttcctctttcagaaataaaacggcgaagcttggcaacatccttgtaatcgatatattccgccttgtccacgcagaagctgcaaacttttctgcggcccttgcgtccgccgcggcggttatctctctccggtctgtctgccattgcgaaagcctccttcttttaaatcattgttgcggagcgcatcagaacggcaaatcgtcgtcgccgatgatctcctcgaaatccccgctgttcccgctcgaataggtgggggcgggttcgctgtaagccgggcgctgcatctcatttccggccgtgctgttaccgctattgtaattgccgccataggacgagccgccgtagctgttgttgctgccgtaattcgagccgccgtcggaattgcgtttggaatccgcaaaattgacgtcgtccgcaacaatctcaaaagccttgcgcttgttgccgtctttgtcggtataggtgcgcgtctgaatggagccgtgaaccgccatcatctggcctttgcggaagtatttgcatacgaaatccgccgtgccgcgccatgcgacgatatcgatgaaatcggtctggcgctctgtgccggatttaacgtaggaacggtcgacggcgagcgtgaagctcgtaacggcgacgtcgctcggtgtgtggcggagctccgggtcagccaccagtctgcccataacaactgcgacattcaacataggtaacaactctctttcgtcattccaaaaaacttattctgcagcggattcttccttagcctcaacggcttcggctgcaacagcctccacgtcgatcggcttcggctcagcggctttgcgcggcttcgcagcagcatttgcaaaacgcgggtccttcttgatgatgatggagcggatgacgccgtcggtgatcttgtagcgtctgtccagctcagccgtgaagtccggcgtgctctcgaagttgatgagggtgtagtagccctccgtctccttgttgatcgggtatgcaagtcttctcttgccccaatcgtcaacgccttcgacagtgccgtgtttcgcaatcagcgccttgaacttttcaaccagctctgcgctgccctcctcaccgagctttgcggagaggacgagcacggtttcgtacttgttctttacctctgtcatggtttgcacctccttttggactttggccccgtcctttaaaacggagcaaggattgtcggcgcggctttgtattccaatccgcttttgcggtcatccgaagcaaagcgcactaacggaaatattataccataaaaaaacgccaagtcaagggaaatttcccccgcatggcgttttttctcaaagtgtttcggcaatttctttcagataggcccggaattcggcgccgatctcggggtgctgcagagcagcctccacctgcgcctgcatgatgccgagcttattgcccatatcgtagcgcttgccggtgaagtccacggcggtcatgccctcgctgcgggcgagctcgcacatggcgtctgtcagctggatctcgccgcctgcgcccggcgcggtgtgctcgaggatctcgaaaatcttcggcggcagcacgcagcggccgaggatcgagtagagcgagaggatcttgtctttcgagggcttttcgatcatgtcggtgcagcggaaccagttgtcgcggatcggctcgaccttgagggaggaataccgctggatggcctcctccgagacctccttgacgccgacaacgccgagaccgagcgcttcatacgcccggatcagctgcccgcaggccgggtcctcgccgaggatgacgtcgtcgccgtagagcacggcgaagggctcgtcgccgacgaacgcctttgcgcaggcgatcgcatggccgaggccgcgcgtctccttctggcggatgtagcagatgttcgcgaggtgggcgaggccgacgacctcgtcgtacacctcttttttgccgccggcgagcagccgttcttccagctccggggtgcggtcgaaatggtcctcaagcagcgttttgccgcggttcgttatgatgagaatatccgtgatgccggcacgcaccgcctcctccacgatgtactggatcgcgggcttatcgacgatgggaagcatctccttcggcatggccttcgaggcgggcagcacgcgcgtgccgaggccggcggccggaataacggcctttctgactttctgaatcatggtatttccatccttcttgcggcgcatttcgcagcgccggcttcgtattgtattactctgcattatacaggaagccgggcggtttgtcaaagcccgtccggcttctgggaaaagcggccgcgtgcacggcccggattataggaaaaacagggggatccagcgcgtgacgaggttacagccgagcaggcagaaagccaccgccgtgttgacgccgccgcgcgcagaataggcggctgccgcgtcatcttcactgtggctggtgcgcttgatctcctgcacggtgcggatgcagtgcttcatatacatgcggtttgcgcggatgccggagaaaaccatgatgctgagcatcagcgcgtacaggagaagcggcaggcagaaaagcacgtactgtgccgggttatccgagagatactgcgtgagcgcgctcatgagctgtaaataggtggcgtcgctgtaggagatccccgccgtgtcgagcgctgtgagcatgatcgggttcagcgcgaagtatgagagcagcatcgagccgatatacaagaggagcatcgccgctgtgagcaaaatgcccggcttatactgcttgcggtacaggaaccagccgcccgaaaacaggaaggcggagaaattgaatttgccgcgcttatacgtgttcatgttcttgaacaccgccatatagtagccggaattctgctggacgagcttgctcacgtcgccgtaggtggcgttttcggcgatcggctcgccggggttcacgccgcccatcgggtcaaaggcgacaggcatgccgccgaagccgcggtatgcgccgcccaccggcggcgggggaggcggatagccgcctgcgccgggcgcgcggttctgtgcgccgccggcctgctgcgtgctgtagcccgagttgcggtgcgtttcgggcgtgcccgtcagcgaggcgttgcagatgctgcaaaacagcgcgctgtgcgcgttgagtgtgccgcagttcgggcattccttatccttgatctcgctcgagacgtccggcgcgttcggcgggggcggaggcgcccagtccttgcccgcctcgtgcaggtccgtgaagatgcacgcgcccttttccatatagcatgcccggtggtacggcgcgccgcacgtggggcagacgacgatgtcgtcgttctcggtgaacggcttctcgcatacagggcacttgattcccttatagtccaaaatgattcctccaaaatctcttcgattttcgaaaaacgatgtatcttttctctattctactacaatatgcccgagatcgcaatgcacggccgataaattttcagactgttaataattccgaaaatccgcataaaaaacccgcaaaacagcatgcactttcctgtttacaaagccgggattatccggtataatataaaaagatatgcgcaggcgcaggcagccgcgcgggtatgcccgcaaagcggctgccaggctgacttttgctttggaaaggtattttggaatatgctgcaatttgaagaactcaagagagaactgcacgataaacaggcggccctcgatgaactcaaggatgcgctcggcctcgagcggctgcgcgaggaggtcgagatgctcgagaacaaggcggcggagcccggtttctgggacaatatggaggcggcgcagaaggtgctgcagagaacggccgcgctcaagcagaaggacgagacgtacgtgaagctctgcgcccgtgcggaggacgcgctcgcgctcgtcgagatgggtgacgaggcggaggatctctcgctgctgcccgaggcgcaggcggagatcgaggcgatcgcgaacgagatcgagacgatgcgcctgacgacgctgctgaccggcgagtacgacagcaagaacgcgattctcacgttccacgcgggctccggcggcaccgaagcgcaggactgggccgagatgctgttccgcatgtacaaccgctgggcggagcgccacggcttcaaggtgacgacgctcgattacctcgacggcgacgaggccggcctcaagagcgcctctgtcctcgtggagggcgagaacgcctacggctttttgaagagcgaggccggcgtgcaccggctcgtgcgcgtctcgccgttcgattcggcgggccgccgccacacctcgttctcctccctcgaggtcatgccggagatcgacgaggacctcagcgtggagatcaacccggacgacatcaagatggaggtctaccgtgcgagcggcgccggcggccagaaggtcaacaaaacgtcctcggccgtccgcctcatccatatcccgacgggtatcgtcgtttcctgtcaggtggagcgcagccagaaccagaaccgcgacgtcgcgatgaagatgctgatctcgaagctcgtcgagatcaaggagcgcgagcacctcgagaaaatttcggacatcaagggcgagcagaaggagatcacttggggcagccagatccgctcctacgtgttcatgccgtacacgctcgcgaaggaccaccgcactggctgcgaaaagggcaacatcaacgccgtgatggacggcgagatcgacgagttcatcaccgcgtacctcaaggcgctgagtcagggcacgctgggcgaaaacatcgaataaaaccgggccggaaagccggcgcggaaaaagcggcgccttcgggcgccgttttttgcaaaaattttgcaggcgaaaggaaaatttaagaggtttctttattcctttttgcgaaatactgtggtatactgagtcacaaggccaaaatacgataactgcattggccggatgccgctggctctccacgcccgttttgcggagagagaacagccccatgcagcgccgagcgctgtgtgcgatcgctgaatcatgcaagcgtgcatggtagaaaggatggtaaacccatgaacacaaaaacattcgagacgtatgaatccgaggtgcgctcctactgccgcaatttcccggcggtattcaccaccgcgaagggctcgatcctctgtgacgaggacggccggcagtacatcgactttttctgcggcgccggcgcgctgaattacgggcacaacaacccatacatcaagcgccgcctgatcgactacctcgagcgggacggcgtgctgcacgcgatggacatgtacaccgcaccgaagcgcgaatttatcgattattttgagaacgagatcatccggccgcgcggtctcgattataagatccagtttgtcggcccgacgggcacgaacgcggttgaggcggccctgaagctcgcccgcaaggtcaaaaagcgcacgaacgtctttgcgctgatgggtgcgttccacggcatgacgctcggctccatcgccctgacgaccgacgcggattcgcgtgccggcgcgggcgtgccgctctgcaatgtcacgcacatcccggcgccctacatgttccccgagctcgacaccgtcgcctatatggagcgcctgatcacggacgaccactccggcgtcgaaaagccggcggcgatcgtcctcgagacgacgcaggcggacggcggcatctacgcgctgccgaccgaatggctgcagcgcgttcgcgcgctctgcgacaagcacgacattttgatggtcgtcgacgacgtgcaggtgggctgcgcgcgcacgggctggttcttctccttcgagcgcgcgggcatcgtgcccgacatcgtgacgctttcgaaatcgatcggcggctacggcatgccgtttgcggtcacgctcctgaagcccgagctcgacgcgtggaagcccggcgagcacaacggcacgttccgcggctaccagctctcgctgatcgcggcaaaggccggcctcgaatacatgctgaatgagcatgtggaggcgggtgtgcgcgagcgcgagcagatcgtcgcgaaattcatgcgcgatgagatcggcgcgatcgacagccgcatcgaaacgcgcggcattggcctgctttggggcgtcgatttcggcggattcgagggcgacgtgtcgaaaaaggtgctcgacgaggcattcaaaaacggcctcatcgtcgagcgcgtcgggcgcggcaacgcggtcatcaaggtcatgccggcgctgaacgtgccggttgaaacgctggagaccggcctgcgtattctggcggatgcggtccgcacggtgctcgcaaaataaagcagatttaaagccgaacgcgtttcagtgccgttcggcttttctgttttccgctgcaccttatgtgtggaaacggtatgatttttctaagggcgcagagaatatatataaacgtatgctgccgaaaggcagggaaaggaagcggtattatgcagaaattcagcgagctgccctacacgcggccggacatcgcggcggcggtcgagcagtataaggcgctcagtgaggcgcttcgcggcgcggaaacctacgcgcaggcgcgcgaggcgttccaaagagcggaggcgctcgaaacggcgcttagtacggcggaatccctcgcgagcatccgcaacaccatggacacgaccgacgcgttttacgacggggaagtcgcgtatttcaacgagaacctgccgaacctgatccccgtgtcgaaggcgttcagcgaggcgatcgtaaacggccctttttgcgccgatttcgagcgggagtacggcgcgcactttatcaagctgcttgaaaacagcctgctcgtgcaggatgcgcgtatcatcggcgatcttgtccgcgagtcagcgctgtcggtcgcctactcgaaggcggccgccgcctgcaagacggagttccgcggcgagacctgcaatttttacggcctcttaaagcatatggaaagcaccgaccgcgcggagcggcgcgaggcctttgaaaagtgggcggcgctctacgaggccgccgcgcccgagctcgacaggatctacgacgagctgatcgccgtgcgcgcggatatggccgaaaagctcggctttgagagctacacggcgcttgcctaccgaaaccgccagcggcttgattacacgcccgagcacgtcgaaaaattccgcgagcaggtccgtacggtcgtcacgccggcggtttccaagatgcttgaggcacagcgcaggcgactcggcgtcgacaagctgcggtattacgacgaaagcctcgtgtttccgggcggcaacgcagaccctgccggcagcaaggatgatatgctgaaagcggcttcagagatgtacagcgcgctttccccggagacaaaagaatttttcgatttcatgaccgagcacgagctctttgacctcgagacgcgcccgggcaagcacctcggcggctactgcacttcgctgccggcctacaaggcgccgttcattttctcgaatttcaacggcacctcggcggacgtcgacgtgctgacccacgaggcggggcacgcgttccagtgctatctcagcgagcggctgatcccggcttccgctttgcagagttcgacgagcgagatcaacgagatccactcgatggcgatggagttcttcacctacccgtggatggataaattcttcggggaccgcgcggacgaataccgctacgcgcacctgtgcggcgcgctttccgtgatcccctatatggcctgcgtcgatgaattccagcacagggtgtacgccaagccgcgcatgacggccgcagaacgccgcggcgtctggcgcgcgctcgagaaaaagtatatgccgtggcgcgattacgacggcaacgaatttctcgagggcggcggattctggatgcagaagcagcacattttcctctacccattctattatatcgattacgcgctggcacagatctgcgcgttcagcctgtacggcgagatgaagcgcgaccgcgaaagcgcgtgggcgcgctacctgaagctgtgcagggcgggcggcacgatggggtatttcgacctcctgcacgatgccggcatcccggtgccgtttgaggcgggcgccgtagagggcgcggtccgcggcgtgatcgaggagatcgaggccgccaagtattgatctgcaccgccgcaaggggtctgccggcggctccatggccggcggcccgctctgcattcgggcggacttcatcgccatacaaataaacagcagggaacggcgcctcggctgcaccgttccctgctgctgtattattttcattctgcttgaactgcaatttcgccctgttctgcggtgctctgcaggcctgtctcgatggaatttagatattccgtctcgaagccgtaggcgagatagagaaaatgcgcgcgcacgtcacagtcccagcttgtcacgtcggtgaaaaattcatcgaaatgcgtgtcggggcagggggcgccgagggtttcggcgtatccgccgcgtcccgccgtgcagggcagagcacagcccgtgtaaatacgcgccgcgtcgctcatgccgaaatacgagaggccgcggccgcctgtggcgctgttctcgaaggtggggtcgaagtggtacggctgtccgccgagctcggcgatgacccaccggtgctctgtgtcgccggcggtgcccgaagcgatgcgcgcggcgatgccgttttggttgaacaggtagcagagcgccgcggcaaattccgcgttgccgccctcctgctcgacgatcatgcggtaaagcgagttttcgccgctttccgcgtacgtacagccggcgctgaccgcccggtacagactgacggcggtttccagctcgttcgattccgcatagaccgcgccctcgacgagcagttcggcggcgctgtcgaattcctcggccgagccgctgccggccggcgtgatcgtcacggcgccgttttcggcgatttcgagccccgcaagcgcgctgtagggcgattcggcaaatacctctgcggcgagcgcggcgctttcatagccggagagctgcgcctcgggcgcgccggcacatacggcgtcgatgagcgccgcgtaatcgtcccgcgcgtttccgaggtaggctgcggcgtctgccgaaagcagatagcggtctgcggtgaaggcgcgcggcgtgaggacgggcgcttcggtcgccgtcggggcctcggcgagggcggcacccgcgccggcctccgatgcgggcgtgggggaagccgccgcgccgctttgatcgccgcagccggaaaaggcggggagcagaacggcgagtgaaaggagaatcggaacaaatcgtttcatggagcacagtcctttccggtcgttttactggcgcggcctcgggctatcggcgcccgaatttccgcttggcgcggatatccttgccgcggaagggcattcggtcgtaaaaaccgagcacgcgtgagacgaagcgctcgttgtagcgcttttcaagctcctgcatcgagagattcgagctgatgatcgtcggcttcgcgagcatgatccgtgtgtcgatgatgttgtagatcatggccgtgatataggaggaggaaatctccatgccgaggtcgtcgaggatcagcaggtcgcattcgttgagtagttcgagcgtgtcgccgccgttttcgtcggcgcgggaaaagcgctcgcgctcgagtgaaaccgcgaaattctgcgcggtgccgtatacgacgccgaaacccttgtcgatcgcggcggaggcgatggcgagcgagagatgcgttttgcccagcccggtcgcacccgtgaaaaacaggttgccggattttgccgaaaagccctccgcatagcgcttgcagtagtcgagaatatagcgcatctgctcgcggtcggagcgccgcccctcgacgggcgcgtcgctgtagtaatcgagggaaaaatcctcgaaagtcgaaagcgtgagcggggagatgcggttcaggttttcgtaggcgatctgccgcagcagcgcgcggtggcaggcgcacatacgaccgtccacatagccggtatcctcgcactttgggcagacatactgcggctcgatgtcggcgcgcgcgaagccgtgttcggcgagcagctcggcgaagcggcgctgcaggccgaggttttccgccttgagcgcttccagcgaggcgcgcacgtccgtgccgcgcagcacagcctttgccgcttgacttgcggtggaggcgatgcgccggcggacgtcctccgcctctgggcagacggcgtaaaaatcgtcgagccgttgctgcgcgcggccaaccgcctcgctgtggcgccggttcagctcgttttcagcttccatatagacctgtctcgaatatcccatggccagaccgtttccttttctcaatagtatatatgtgcgggaaaccgctttgcggcgttatttctccgcatcgaaaatatcgtacttctcgtactcctcgaggtcgtaggagggcttgtgcttcggctcgcggtgcgtttcggcggcgagcttctcgtccacggcgtccttcagcgtgcgcacgcccgcgttgtaccagcgctcgagaatggcgttgatgtatttcatgttgactttgccggtgttgtccacacagcggttgtacgcttcgttcagaagctcgtcgggcatgccccactcgaatacccagcggtgcgcgtactggccctcgttccggcttggcgcgcgccgcgaggtcatgccgaaggcgcgttcgcagcgcttccacgcgacggcggtctcatcgagctcgcgcagtttctcctcggcggcctcgatgcttaaaatgctggagtccgcccagttgcgcacggtggattcgatatagctcgtgttggcccggccgatcttgttggcgtaggcgacgagcatcaggatgacctcgcagggcaggccgtaatcctcgtgtgcctgaatcagcgtgccggagagcgcgggagagagcgttttgccgagcatggcctccgcctcctccacaagccggcggattgacggcgaggtttcgacaagctccgagatgtatacgccgtccgggcgcagcatgcggcgcggcggcgccgggcgcacgagctgtgccggcgcggcggcagcgggcgcaggagccgcggcgggcagcagcgatgttgcgagcggggcgtcctccctttgaagcaggccgttctgcacccagaactgcaccgcgctttccgctctgctgccgctgaggccgaccgccgcggcgatctcctcggcggagtagctccgcccgttattgcgcagaagccagaggatcactttgagctgatctccatccgccgctttgatgtattggtcgacgagcgcgccgggcacggcaaaaacggagctccaagctccgagctgcaacgcatatcccatccacaaccgcccctttccgacagtgtttgcaaaatgaattcgtaaggataagtatagcacaagtccggcgcgcatacaagggtgaacgcacgccgggagctgccgaaaaaacgggcgacaaaatttccgaaaaaatttcaaatcaggtattgacttccgtcatgcttttatgtataataaatgacgttgcaaacgcaatgtgctgatgtggctcaatggcagagcagttcactcgtaatgaacaggttgtcagttcgattctgaccatcagctccaaaaacccagtattcaaccgataaggttggatgctgggtttttctttgtttccgcgcattgacatgcttatatacagcataaaagataagcatcaaaaacgaccctctggaaagcgattcgcctttacagtgacagcggtttttacaagaggaatccctgtgtacaggagttctggaaagcaaaacagctttacagatgcggcccgaataggggcgtagggcggcgtttgccggagcgattcgggcaggtgctgtgcggggaatatatttaacattctgtttcttgcttctgcggccggtctgtgttatgctgaaaacagaatccgaaaagggggatgcagtgtgcgcagcgaagaatttatcgacttatataagcagcttgaggatgcgctggaggagaaattcagcggcgtaaagcggcactattcgagcgttattttcgagtatatcaaccattatgagagcgcacccgtgcgcgaatccctgaatctgtgcagggagatccgcaatttgatgacgcacagtgcaaatctcggcggcgtgccaattgtcgagccgagcgagccggtgctcgaatcgctgaaatcgacgctcgagtacgtccgccgcccgccgctcgcactcgattatgcgacggctggccagcgcatcgtctgcgctggtctctccgaccgccttttaaagctgatggagcggatggataaaaacggcttttcacatatcccgatcatcgataagaagcggtttgtcggcgtgttcagcgtttccacgattttttcctgcatcctgctcgagccggcgctgcgcatcacgccggaaacgacgatccgcgagctcgggcgcatgctgcccgtcgaccggcacatcgaaaactacgcctttgtggaccggcacaccacaatgctcgaaacgcgccggatgttcgagaagatccgcggcaaaaacaagcgcctttcggtgatcttcatcacggagacagggagccgggaggagccgctgctcggcatgctgacgccctacgacgtcatgaaagacgactgaaaaaacaaatgagcaccgatcgctcggtgctcatcttttaaggtcagctttagattgctcttgtaaccttgccggaacgcaagcagcgggtgcaggcgtatacacgcttcggtgtaccgttaacaagtgcctttactcgtctgatattcggtttccacgttctgttggagcgtctgtgggagtgggaaacctgaatgccgaaggatacgtcctttccgcaaatttcacatttagccatctgtctgcacctccttaaagtgccaaatcttcattgcaacatacgtattgtagcagaaacgatcggaaattgcaaggtttattttttgtttctcaattgttttttaaaagggaattgttttttttgcgcatatgctttataattcatggtatccgaagaaaagtatctttgtggaaacagccttgctgccgcgcacgctgtgccggaagcggcgggtgagcgcggcatgtgcggcgcctgctataaaattataaatttaaggaaaggaatgctttcgcacggcggaagcgatggtcctgattatgctttttaattcgattatgagcctgctgcgcggcggcagcgtcgatcccgtcggcgtgctgatgcagattctcgcgacgctcgtcattatttttctcgtgctgccgttccatgaatttgcgcacggatgggcggcaaacaagctcggcgatcccacggcacggctttcgggccggctgaccttcaacccgcttgcgagcatcgacccgctcggcgcggtgtttctgctgctcttcggcttcggctgggcgcggcccgttccggtggacagccgctactttaaaaacgagcgcaccggcatggcgctgacggcgctggccggccctgcggcaaacctgatcgcggcgtatgccggcgcgctgatcttctatgccatcggcattttcgcgccgtataatgcggtggtccactacatcctgatctttttcaactactatgcgatgatcaacaccgtgctcgcggtattcaacctcgtaccgattccgccgctcgacggctcaaagatcctcgcgagctttttaagcgaccgcgcgcgcttcaaattctaccagtatcaaagcatgctctcgatggtcggcatggttctgctcgtttccggcatgctttccgggccgatcggcatggcggaaaacgctgtgtacagcggcgtgctctggttggctcggctgccgttccagctgttcggcgtggcgtaagcgcgtatggcagagggaaaaatggaaacactttcctataagctcgaggtgttcgaggggccgctcgacctgctcctcacgctgattgcaaaaaacaagctcaatatttacgatattccgatcgctttgctgctcgagcagtatatggagcagatcgagcgcatgcaggcggaaaatctggatgtcgcgagcgaattcctcgaaatggcggcgcggctcgtgcacatcaagagcgtttcgctgctgccgaagcgcgaggaagaggaagtgctgcgccgtgagctgaccggccagctcctcgaatacaagcagtgccgggaaacggccgaaaagctgcggggcatgctgtcgtttgacaggctcgtgcgcccgcagtcgaaaataccggcagactacgcctacaagcggcgccacgcgcccgaggaaatgctcgccgcctatctctcggcgatggggcgcaggcggcagaatgcgccgcctgctgccgaggcgttttccggcatcgtcgcaaggccggtcgtgtccgtcgcgtcgcagatcgtttccgtgctgcggcgtttgtggaagcgcgggcgcgtgccgtttcgcacactgtttgcggacaagcacggcgcttcggagcgcgtcgccgcgtttctcgcggttctggagctcgtcaagggcaggcggctgcgtgtggagggcgacggggacgactgcgaaatcaggctgatcaacgggggtgaatgatctgaaaaaggaagaattgctcggcgcggtggaggccgtcctctttgcatgcggcgagccgatcggcgcggataagatcgcggcggcgctcggcgtgggggaagcggagatccgcgaaatcaccgggcttctgtgtgaaaaattcaacaccccgcacagcggcatccacctgctggtgctcgaaaacgacctgcagcttgcgacgaacccggcgttcatcgagccggtgcgcgccgcgctggacctgcgccgcaacgcgccgctttcgcaggcggcgatggaggtgctcgcggtcatcgcgtacaaccagccggttacgaaggcgtttgtcgagcaggtccgcggcgtggactgctccggcgtcatcggcagcctgacgctcaaggggctcatcgaggagcgcggccggctggagctgccggggcggccgctcctgtacggcacgacggacgcgttcctgcgctgcatgaacatccgctctgtggcggatctgccgccgctgccgaagagcgaaggggcggaggcggccgatgcagagccgcctgcggacggcggtgcgggcgcatgattgttctgtggattctgctcgggcttctggcggctgtttttctgtttcttttggttcccgtgcacgccggtgtgcgctaccgggaaacggtagagctcacggtgcgctggctgttcctgcggcgcacgctgctgccggagcctgaaaagccgaagccggaaaaggcgccgccgcctgccggagaaagcaagccgcccgcgccgaagaaaaatcccctgcgcgaaaagctcgcgcgctttcgcgaggccgagggcctttcggggcttctgcgccttgcgggcgatttcctgcggctgacgggtacgtccgccgtgaagatcatccggcggctgcgcgtgtgcgatttcgacctctacgtgctggccggcggcgaggacgccgcggcttcggccatcctgtacgggcaggcctgcgctgtggtgtacccggcggcagaggcgctttttgcgctggcgaagtgcaggcgccgccgcgtgacggtcgacctcgattacaggataaaggcgccggccgcgcagctttcagcggacgtttcggtccggccgatattcctgctggtttacggcctgcaatatctgatcgggcttctcccgatctatcaaagattcagcggccccgaaagcggggcaaagcggaaaggttaaagctatgagtgaaaacaaggtcaacaatcttctcggcgcatccatggacaaaatcaaggagatggtggacgtcaacaccgtcgtcggcgatccgatcacgacgccggacggcacaacggtcatcccggtttcccgcgtgagctacggctttgcgggcggcggtaccgatctgccctcgaaagtacagccggaaaaggggcttttcgcgggcggcagcggcgcgggcatcacgatcagcccgatcgcgtttctcgtgatcgcgaacggcaatgtgcgcgtcttgcagatcgagccgtacctgtcgtctgtggatcgaatcatcgccaacgcgccggatatggtcgataagctggcggggcttttcaagaaggatgatggagacggggacgccgctctgccgccgcagtattgaccggcataaatcgctgcccggcgccataaaatgggctgtggcaggtgatgggattgttcagaaaaatttttttggcggccgcggccgctttgaccgtgcttttcgcggcagtgccggcttcggcggcggaagcgccgtccgtttcggcgcaggcggccgtgctgtacgacccgctgagcggcgcggtgctgtatgaaaaaaacggcggggtagtgctgccgatggcgagcacgacgaaaatcatgacggcgctgctggcctttgagagcggccgcgccggtgaggtcgtcgagatcacggcggaaatggtcgcggtagagggttcctcgatggggcttgcggcaggcgaccggctgacgctcggcagcatcgcgcgcggcatgatgatggcctccggcaacgacggtgcgaacgcgatcgccctgtacctcggcggcagtgcggagggctttgcggagatgatgaacgcccgcgccgccgagatcggcatggaaaacacgcggttcgtcacgccctccgggctggacgcggagggccacggcacgacggcgcgtgatatggcgctgctcggcgccgaggcgatgcgttgcgcggatttcgctgatacggtcggtgcagcctcgcagacggtggagttcctgtcgccggaaaagaccgtgcggtatgagaatcacaaccggcttttgcagctctacgcggactgcaccggcatcaagacgggcttcacgaaaaaggcggggcggtgcctcgtttcggccgcggagcgggacggcgcgcagctcatctgcgtcacgctcaacgcgccggacgactggaacgaccacatcgcgctgtttgaatacgggttcgctcagtttgaaacgcgcgccatcgtgccggacggcgcgcagtatgcggtgccggttgcgggcggcgccgcggaaacaattctctgccgggctcagggtgaggcagctgtcacgctgcaccgggatgcggcggtcacggcttcggtttcgctgccgcggttcgtctatgcgccgcttgaggcgggcgagcagctcggcagcgtgacctatcgggtgaacggcagcgtggtggcgcagatcccgatcgtttcggcggaggcggccgtgccggcggatacgcgcagcggctttcaaaaatggctggataggctgcgccgcccggcgtgacgggaataagggaaaggacgctgcccggcctctctattgagggcggggcgcgcagataaaaaacggatttggtgattctatggcaaaagatacgagactgcaaaagatgctcgcggactgcggcgttgcgtcgcgccggaaggcggaggcgatgatcgaatcggggcgcgttgcggtcaacggcgtccgcgcgtcgatcggcgacaaggtggatatcaaaaaggaccgcgtcacggtggacggcgagcccgtgcgtcccgtggaggaaaagctctacatcatgctgcacaagccgcgcggctatttgaccgcgatggccgacgaccgcggcagaaagtgcgtcagcgagcttgtcgaagagcttgatgcgcgcgtgttcccggtcgggcggctcgacaaagattcggaggggctgctcctgatgacgaatgacggcgcgtttgcaaacctgatcgcgcacccctcgacgcacgtgccgaaggtgtaccgcgtcacggtgcgcccgggcgtgacggaggcgcagctcacgcgcctttccgtcggcgtggagatcgacgggcggatgaccgcgccggctacgatccgcgtgctcgagcagcagccggggcgcgtcgtgctcgaatttgtgctgcatgagggccgcaaccggcagatccgcaatatgtgcgaggcggtggggctcgaggtcgcgcggctcaagcgcacggcggtcggcgcggtcaagctcggcatgctgccgcagggccgcttccgcgagctcacgccggacgaggtgcgccgcctgcgcgccgcggcgcagaaaaaaggcggtcagccgcagagaacggagggaaaaggaaatgctgcaaatcgtgccgatggaggaaaaagaccgggaaaaggcaattctccgcgcaacagcgggcgccggcgctgaggcgcgcgtgctcgtgatgacggacagcgcggacgagctcggctatgttgcagccggacttcaggcggacgcgctcgtcgtctacggcttttccgtgggcgggcgcaccgattttgccgccgaaaagccggatgcagagaccgtgttcgtgctcgacacgctgctgcgcgccgccgcgtcgttcggcgaggtacacggcgcgcggcgcattcgcaccgcgtttccggatttctacgattttttccggctgcgcggcttcgaggcgctcgagcagtacgccgaagcgccgatggaagcgatcgtgcactacacgtaagggcagggccgtggggatgaggtatccctgcggccccttttcatgtagaaaattccgaatttctgcccgtacaggttgcattttccgcatcaaaatggtaaaataacttgataatggattatagtcggttcgtgtgtcctcttgcggtatgcgcccggcgaaataatgcaaggaaaagagatgatccaaatggtgaagagtatgaccggatacggccgctgcgaggaaaccgtcggcggcaggcgcattacggtggagctgaaatcggtcaaccacaaatatttcgagttttcgccccgcgtgacgcgcggctacggctttctcgaggataagctgaaaagctacgtgcagagccgcgttgcgcgcggtaagatcgacctgttcctcagcatcgaaacgctggaggacgccgatgtggtcgtcagcgtgaatcattcgctcgccgccggctatatcgccgcgctgcgggagatcaccgagcgctacaagctgcccgatacggtcacggtcaattcgctgtcccgctactccgatattttctcggtgcacaaggcgcccgaggatgaggaggccatctgggcggcggttcagccggtggcggaaaaggccgtggacgcgttcatcgcgatgcgcgagaccgagggcagccgcctctatgaggacgtgatggcccgcgccgccgtgatcctcgagctggtcgggaagatcgaggcgcgctcgccggaaacggtgaaagcgtaccgcgagcggctggaaatgaagctgcgcgaggtattgagcgacacagcgatcgacgagcagcgcattttgaccgaggccgcgattttcgccgataaggtggccgtcgccgaggaaacggtgcgcctgaggagccatttcgagcagctcaagtcgctgctcggcgccgaggaaccctccgggcgcaagatggactttctcgtgcaggagatgaatcgcgagacgaacacgatcggctcgaaggcgagcgattcgcagatcgcctacatggtcgttgacatcaaggcggagatcgagaaaatccgcgagcagattcagaacatcgagtaaaccggaaggagctgtaaagtcatgcagcttgtcaatataggcttcggcaacatggtgtctgccgagcgcgtgatcgcgattgtcggcccggaatcggcgccgatcaagcggatcgtgcaggattcgagggagcgcggcgcgctgatcgacgcgacctgcggccgcaagacgcgcacggtgcttatcatggacagcgaccacgtggtgctttcggccttgcagccggaaaccgtttcgaaccgcttcggcggccgggcggcggacgacgcggaggaaagtgcgctgtagcggacgcagggaaaagaaatgaagggaaaaaggagggcggcgctttggcggaaagctgcggcgcggcctttgcggaaaggatggcctgaaagggccggggtaaaactatgaaaaaaggattgctgatcgtcgtttcgtcaccgtcgggcggcggaaagggtacgattctgaaggcgctgttcgagcgcaacgcgaacctgcgcatgtcggtttccgcgacgacccgtgcgccgcgcgagggcgagcaggacggcgtgcactaccatttcatcacaaaggagcagttccagaagaatatcgcgggcggcgcgatgctggaatacgccgaatactgcgaaaactattacggcacgccgaaggcgccgattcaggcgtggctcgatgccgggcacgatgtcgtgcttgagatcgaggtgcagggcggccggcagatcaagaccgccgcgcccgactgcgtgagcctctttatcctgccgccgtcgctcgaggtgcttgaaaagcgcctgcggggccgcggcaccgaggccgacgcggtggtcagaaagcgcctgcaggcggcggaggaagaaatccgctgcgtaaaggattacgattatgccgtcgtcaacgacacggtcgagcaggccgcggcggaaatcgaagccatcttaaccgcggagaagctccgtgtttcccgcgaaaacaatattgctgaaaggattttgaaccatgcttaaaccttcttcgaacatcatcaagacaccgcacaagagctactattccgttgtgattgccgtcgcgaagcgcgcgcgtgagatcgtggaaaaggcggaggaaaacaaccagattctcgtcgagaagccggtcgacctcgccgtgcaggattttgtagacgacaaggtccgtatcatcgagacggagaccgaagaagaaaacgtataacccgaaggagtcctgaatttgctgttcgcccagttggcggtcgagaacacgacctaccgtttcgataagccgttcacttataccgtgccggaggcgcttgccgcggccgtgcgcccgggcgtgcgcgtcacggtgcctttcggcgcgggcaaccgcacgcgggtcggcatggtgctctcggtttccgaggcgccggcggcggacgggcggctcaaggctgttttgcaggtgctcgacggagagccgcttttgagtgatgagatgctggcgcttgtgccgtggatgaaaagccgctattactgcacgcttttcgaggctgtgaagctgatgattccggccggcatcggctacaagctcgtcaaccgctaccgtatgagcgccgcgttcaaggattacgaccgcaccgcgcacggcgatctggaatggcagatcatcatgcagctttccgacgcgaaggacggcatgaccggcgcgcagctttccgcaaagctcggcatcgacgagaagagcggtgcgctgcgcgggctgcttgaaagaggcgtcgtgctttgcgagaacgcggcgtcgcgcaacctgaatgacgcgacttcccggatggtctgcgccgtcccggatttttcgggcaagctctcgccgaagcagcagagcgcctacgacacgctctgcgcggcgggtaccgtgacggtgcgcgagctgagctactacacgggcgcgagcaccgcggtcatcaaggcgctgtgcgacaagggcgccgccgagagcttcgaggtcgagcggttccgccggccgaaggtttccgccgcggatgtcgcgctgcccgaatcgctttcgccggagcaggcgcgcgctgcggaaagcatcgtgcgcgagtgcgacgggccggagccggcggtcgcgctgctctacggcatcacgggatcgggcaagacggcggttttcatgcacgtgatccggcacgtcctcaaaagggggcgcggcgtgatcgtcaccgtgccggagatctcgctgacgccgcagacgcttgcggtctttaccgcggcgttcggcgacacggtcgccgttttccacagcggcctctcgatgggcgagcgcatggacgagtggaagcgggtgcgcagcgggcaggcgaaaattgtcgtcggcacgcgctcggcggtctttgcgccggtgcaggcgctcgggctgatcgtcatggacgaggagcaggagagtacctacaagtcggagagcagcccgcgctaccacgcgcgggaaatcgcgaagttccgcgccagctacaacaaggcatactgcctgctctgctctgcgacgccgtcggtcgaatcgtatttcatggcgaaaagcggcaggtaccgctaccacgcgcttttgaaccgctacggcgacgcgctggtgcccgatgtgcggcttgtcgacatgaacggcgaggatctctaccgcggcaagccgatgatcagtatggcgctcgcgcgggcgatctccggaaatctcgcgcaggggcggcagtcgatcgtccttttgaaccgccgcggctaccacacctatgcggtctgcaaaagctgcaagacggtcgtctcctgcccaaactgctcgatttccctgacctaccacgcggcgaataaccgcctgatgtgccactactgcgggcattccgagccggcgaacgcgcgctgcgcggcctgcggcagcacggagatcaccttctcaggcggcggcacgcagaaggccgaggaccagctgcgcgaggcttttcccgaggcgcgtatcctgcgcatcgacaccgacacgaccgcgaacaaatacgcgctcgaaaagaagttcgccgcgttttccgccggcgaatacgatatcatggtcggcacgcagatggttgcgaaggggctcgatttcgagaacgtcacgctcgttggtgtgctctcggcggatcagtcgctctacagcgacgactaccgcagcaacgagcgcactttcgacttgctcacgcaggtggtcggccgggcggggcgcggccgctaccgcggcacggcgctgatccagacccacgtgccggaaaacccgtacctgcggcttgcggccgagcaggactacgagcgctttttcgagacggagatccgcttccgccgggcgatgctgtacccgccgttttcggacatcctgcaaatcgggtttgtcggggagaaggaggagcacgtccgcgcggcggcagagtgcttttccgcgcggctgcgggagacgttcagccgggactacccggcgctgccgctgcgcctgctgcgcgcctcggcggcgtccgtttcgcgcatgggcggcaagtaccgctataaaatcgtgatgaaatataagaacacacggcagtttcgggacatcatcgccgcgctgctcgcggatttcgccgcggacaagcgctttcaggcggtcacggcctatgccgacccaaaccccgatgtgattttgtaaatacagaaaggagccatagccatggcacgcagaaatatagtaacgaccggcgacgaggtgctgacaaagatgtgccgcccggtcgagaagttcgacgccaagctctggacgctgctcgacgacatgtatgagacgatggagaacgcgaacggcgtcggtcttgcggcgcctcaggtcggccttctgcgccgcgtcgtcgtcgtcgatgtcggcgagggccgcatcgagctgatcaaccccgaaattgtcgcctcctccggcgagcaggacggcgctgagggctgcctgtcgttcccgggcgagtggggcatggtctgccgcccgatgaacgtgacggtgcgcgcgcaggaccgccacggcaagacgtttgaaatctccggcacggcgctgctcgcgcgcgcgttctgccacgagattgaccacctgaacggcgtgtgcttcacggagcgtgcgagccgcatgctcgaccccgaggagctcgagcgggagggcaacgcatgagaatcgtttttatgggcacgccggatttcgcggtgccgagcctcgaggcgctccttatgcgcgggcacgagatcgcggcggtctacacgcagcccgataagccgaagggccgcgggcacaagctgctgccgccgccggtcaaagcgctggccctcgagcgcggcatcccggtataccagccggcgacgctgcgcactgaggaggctgccgaaacgctgcgcgcgctgaagcctgagctgatcgccgtcgcggcgtacggcaagctgctgccgccggcggttctcgcgatcccgccgaggggctgcatcaacgtccacggctcgctgctgccgaaataccgcggcgccgcgccgatccagtgggcggtgctgaacggtgagaaaacgacgggcgtcacgatccagcagatgggcgaggggctcgacaccggcgacatgctgcgaaaggcggagacggagatcggggaaaacgagacctccggcgagctgtttgaccgcctcaagctgattggcgcagagctgctggtcgatacgatcgaccggctcgacacgatcgtgcccgagccgcaggatgaggcggcggcgacgcacgcgccgatgatccgcaaggaaatgggcgaaatcgactgggcaatgcccgcgcaggcggtgcacaaccttgtgcgcggcctgaacccgtggccggcggcgtttttcatgctcggcggcaagcgcatgaagctgtaccgcacggagcttgcctgcgcttcgggcgagcccggcaccatggctgagctggacggcgaaatgaccgtgttctgcggtgagggcgccgtgcggctcacggaaattcagcccgagaacggcaagcgcatgcgcggcagcgactacctgcgcggtcacccgctcgcgggcgatacggtaaggattcggtgatatggcgacttcatcccggaaaacggcgctcgcggctttaaacgccgtgacgcagaacgaaggctattcgaatatcgtgatcgacaaggcgatccgcgccgcaggccttgcgccgcgcgatgcggcgctggcctccgcgattttttacggtgtgctcgaaaagcgcatgacgctcgactacgcggtgcggtgcttcctcgcaaagccgaagcagaagatggacgagacagtgctcaatatcctgcgtatcgcggcgtatcagatgctgtacctcgataagatcccggattccgcggcggtcaacgaggcggtgctctgcgccggcgaatacatgcgcgggcgctacaagggctttgtgaacggcgtgctgcgcagcttctcgaaggggaaagagacgatcccgccgcccgaaagcgaatgtgtgcgctggaacatcccgcaggcggtcatcgacgtctggcgccgggactacggcgcgccgctgacggagcggctgctcatggcgatggcggagcgcgcggagacgtacatccgtgtgaacacggtgaaaacgacggcggcgcagcttctcggcatgctgccggcgggtacggcggagaccgccgtggaaaacgcgctttgcctgcgcggtgcgggcgatcctacggcgctgccgggcttttccgaggggctgttccatgtgcaggacctctcctcgcagcttctgtgcgcgctcgttaacccgcagccgggcgaaagcgtggcggacgtctgcgccgcgcccggcggcaagagcttcacgctcgccgagcgcatggaaaactgcggccggctcgacgcctttgacctctacaaggggcgcgtcagtttgatccgcaggggcgcggagcggctcgggctttcggcggtttccgccgccgtgcgcgatgcggcggttgggccgtgcacggggcagtacgaccgcgtgctgtgcgacgtgccgtgctccgggcttggcgtcatccgccgcaagccggagatccgctacaaaaagccggagagctttgccggcctgccggcgctccagcttcaaattttgacgcattcggcgtcgctggtgcggccgggcggcctgctgttctattcgacctgcacgctgcacagcgcggaaaacgcggcggtcgtcgcggcgtttctcgaaaataatccggcgttcgagccgtatgcgctgccgctttccggcgtttcgcgttctgtttcggacgagccggcgcatatgctgacgatgatgccgatggatttcggcggcgacggcttctttgccgcgggcctcagaaaaaaggaaagccccgcggcggaaaggacgggataagggcttgggaaaaatcgatatacgctcgatgcagctcgaggagctgcaggcggcgtttcaggagcggggcctgcaaaaataccgcgcggcgcaggtctaccgctggctgcaccagcgcggcgccgcttcgtttgaagagatgaccgatctctcgaagccgctgcgggccgcgctggacgaatcgttcgagctgcgtaatgcggagatcgcgatccggcgcgtttcaaagctcgacggcacggtgaaatacctctttcgcctgaacgacggcgaaacggtcgaatcggtgctcatgcagtacaagcacggctattcgatctgtatttcgacgcaggtgggctgccggatgggctgcaccttctgcgcgacgggaaagagcggcttttcgcggaacctcacggcgggcgagatgctcgcggagattcagaccgcccaaaaggatctcggaacgcgcatttccaatgtggttttgatgggcatgggcgagccgctcgataattatcagaatgttttaaggtttttagggcttgtttcgtcagaaaacgggcttaatattggtatgcggcacatttcgctttccacctgcgggctggttgacaggatctacgacctcgcagaccggaagctgcagcttacgctttccgtttcgctgcatgcgccgaacgatgaaatccggagccggacgatgccggtcaacaaaaagtggaacgtggaggcgctgctcaaaagctgccgctactattccgatgtgaccggccggcggatctcctttgaatatgcgatgatcagcggcgtgaacgacagcgatgcctgcgcgcaggagcttgcgtcccgcctgcacggcatcatcagccacgtgaacttgattccggtcaacgatgtgaccggcacgggctaccgcaagagcggggaggaaagactcagaaaattcacggcgatactcgaaaaaaagggtgtcaccgctacggtccggcgcacgctcggggccgatattgaagcatcctgcggccagctccgcaggcggaacgaacaaggagggacgttataaatgtacgctgtgtgcaaaaccgacatcggccagatgcgcagcacgaatcaggatgtcgcctgctgcggtacgtttgaagacggcagcgcgtggagcgttgtctgcgacggcatgggcggcgtgaacggcggcaatatcgcgagcggtatcgcgagcgcggcgatcgtcgagcatctgaaggccgcatatacccccggcatggaggaggatgcgatgcgtgaaatgatgctttcggccgtgcagggcgcgaacgatgcggtcatccgccgcgccgaggcagagccggagctctgcggcatgggcacgacggcggtcgttgcggtcgcctcaaacggcgtactgcatatcgcccacgcgggcgacagccgctgctacctgaaaacggcgctcggcatcaagcaggtcacgacagaccattcctacgtgcagcagcttgtggagagcggcgcgatcaccgaggacgaggcgcgtgttcacccgcagcgcaacctgatcacacgcgtcgtgggcgttcaccccgagctcgagtgcgactacggctgctttgtgtttgagccgggcgacgtcgccgtgtcctgcacggacggcctgagcaactacctcgagcgcgacacgctgctgtttttcatcagcaattacgcgggcgagcagctcgcggaggagctggtccagtatgcgaacagcaagggcggaagcgacaacatcacggttgccgtcatcgaaaaccgctgagatgaaggagaaaggagtggcctttgcacagcaagggtaaggtgatcaatatggataaatacatcggaaaacgactggacggccgctatgagatccacgagctgctcggccagggcggcatggcctatgtctaccgcgcctacgaccgcatcgaaaaccgctgggtcgcgatcaagattctgaaggaggagctttcggacaacagcgatttcctgcgccgcttcagaaacgaatcgaaggcgattgcggtgctctcgcacccgagcatcgtcaaggtgtacgacgtcagcttcggcgaccgcatccagtacatcgtgatggagtatgtggacggcatcacgctcaagcagtacatcgagcagcagggcgagctcaagtggcgcgaggcgctgtacttcacggtgcagattttacaggctttgcagcacgcgcacgagcgcggcatcatccaccgcgacatcaagccccagaatatcatggtgctcgaggacggcagcatcaaggtgatggatttcggcatcgcgcgcttcacgcaggccgaaacgcagacgatgaccgacaaagcgatcggctcggtgcattatatcgcgccggagcaggcgcggggcggccacatcaacgacaaggcggatatttattccgtcggcgtcatgctgtatgaaatgctgacgggccagcttccgtttgtcgcggacaacgccgtttccgtcgcgatcatgcagatgcaggcggagcctacaccgccgacgcgcatcaacccggcgatcccgaaggggctcgaggagatcacgatgcacgcgatggaaaagaaccccgcgcagcgctttccctcggcggccgatatgctcgaggatgtcgagcgcttccgccgcgacccggagatggttttcaactatggcgaccagatggaccacgcctatgcgcgcggtacggatatttacgacagtgtccgcggcggccagcaggattacaacgacaactacgagtacgaggaggaatacgtccgttcaaggaacggcgcgaaggcttcgatgatcgtcaccggcatcgtggcggcggtcgtcgtggtcggcctcgtagtcggcggcatcttcctttggaattttttcaagaacagcacgcagacggagtccgacgaggtgattctgccggactttaaggggatgatctacgagacggagatcaaggataaccccgaatacgcggactttgaatttgaaatcgtcgagggcaatgtgccgagcaaggcggcgggtgaggtgctgcagcagacgccgcaggccggcatggccgtgaagaagggcaagacggtttcgctcaccgtcaacggcggcacgctcgaggagatcgtcgtcgaggatgtatcgggcgacaagcagcaggaggcctatgataaacttgaggcgctcggcctgaagccgaagattcaggctgtggccgatgaggaaacggctgtgggctatgtcgtgcgcacggagccggcggccggtgccacagttacctccggcacggcgatcacgattttcgtcagctccggcccgtctacggagcaggtctcggtgccgaacgttaccggctcaccgctctcgacggcggagagcgacctcgaggcgaacggcctcgtgcgcggctcgatcacctacgacgacgagagcgacaaggaggagggcacggtgctttcgaccagcccggagggcggcaagaaggtgccgaagggctccgcagtcgatctcatcgtcagctccggcaagggggctgaaaaaaccgtgcactacgacatcccgctgccgagcggcgtttccgaggatctcgagatgagcatctatgtggacggcgagctgtttgactcccgcgtggtaaacccctcggtgtctgcgtacacaggcgcggaattcaccggcacgggacgctctagcctgacgatccgcctcaacgggcaggattacatcacggcggagatcaactacgagacggagagcgtcgacgtgcactcgcaggtcgcctatgcgaccccgacgccggagccgaccgaaacgcctgcgccggagccgactgcggcgccctcgaacgatgcgggcgacgcaccggccggcccggtcacgacgcactgagggcggcccatgcaggctgaacagacagggctggtgctcaagggcatcggcggcttctactatgtgttcgacggcgagacggtgcacgcctgccgggcgcgcggcaagttccgcaaggcgcgcatctcgccgtatgctggcgaccgcgtgcgcttcacgccggatgaaaccggcgaaggctgcctttcggaaattctgccgcggcggaactttctcgtgcgtccgccgctcgcgaatctcgataagctcttcgtcgtctcctcggtcagcgatccgcagccgagcacgctgatcatcgacaagacgatcgcggcggcggagctcaagggcatcgagccggtgctggttttcacaaagaccgacctcgacgacgcctccgccctgcgggagatctacggcggtatcggcctgcgcacgtactttgtctccgcgtcggacggcgcgggcgtcgaggcgctgcgcggcgaactgaacggctgcgtttcggccttcacggggaattcgggcgtaggaaaatccacgcttctgaaccgcctgatgccgcagctcgtgctcgaaaccggtgagatcagccgcaagctcgggcgcgggcggcacacgacgcgccacgtggagctttatccggtggagggcggctttgtcgccgatacgccgggcttttccaccatggacatcgagcggtacgagcttttccgcaaggaggagctgcccgaaggcttccgcgaatttgagccgtatctcggcgcgtgcaaattcacctcgtgctcgcacacctgcgagaaggggtgcgcggtgctcgcggcggtggaagcgggggagatcccgcgctcgcgcatggaaagctatatcgcgatgtacaacgaagtgaaggatataagggagtggcagctatcaaagacaaaaaatgtatgatcatcggcgcggtgccgatggaatcggatgcagtttttaaggaatttgaccccgcggagcattttgtgatctgcgcggacggcggctatgacaacgcggtgcggttcggcatccgcccagacctcgtcatcggcgatttcgattcggcaaagcagcgcccgccgaaggaggtgcgcacggtaacgctgccggtgcacaaggatgtgacggacacgatgggcgcggtgctggtcgggcagaagctcggcatgacctcgttcgtgctgaccggctgccttggcggcgaccgcttcgaccattcggtcgggaacctcaacgtgctgctggccattgcgaaccacggcgacagcggcgtgctctgcacggacgacacaaagattttcgtgctgcgcggcggccgcgtcgtgttcacggagcttcggggcgcgaccgtttcggtctttccgtttgacggctcctcctgcaacgtgacgtatgacgggcttgagtacccgctctaccagaaaaatctgatggcgggttccacgctcggcgcgagcaacagcattgttgcggaccgcgcggagatccgcgtcaacatcggctgcgcgatcgtcgtgctctacacgccgaaaaaggcgtgagcgaaagcggtgtatttgcaggcgaggcggcacaggcatggcggcacgatctcgtgcgccgcacctgtgccgcctgtttttcgccgcccggtaacactttccggcacttccgtatatactggaataacccttcggggcgagtttccgggaaacggaggtgccggttttgcgtaaaccgaagttctgcatgcacggctgtctctcagaccgccgccagcgcgccgtgtgcgccgcggccttcgggctcggcatgatcctcgcgagcatcagcccctcggggttcacgctgtttgtcgccgcggtcatcatggtggcgctcggcatcatgatcatccgctgctgaatgcggaaaatgcgcgcgggggagaaaggccggccttggccgggccccgcttgctgccggcttcgggcgggccggcgccctgcggtgcagggatgaaaatgcgcgcccgaaagaaaggcgagtgaccagagtatgaaggttgttgtacttaacggaaaagggtttatggggtttgtgctgcgccacatgttcggaatcaaaaagctgccgaaggagccctgaagcgatcggcgggagccgggggaacgccctccggctctctttttttatgcgtgcatattgtcccactgccgctcatagtaatgaagcagaaatcaaagggcagtgaaaggatgagaagaatttatgcgactcacaacaggcaatcagctctatgaaggctttgaacagattatggagtccacccacgagtgccccgtcgatacggaatacaacctgccggattactgcgcggatattcagaagatcctcaagtgcatcgttacgccggaggtcgtttccgctgccgtgatcggggacagcttatcggtggacggcacggcggacatccgcgtgctgtatctcgacgcgaagggtgagtgcgtgcgcggcttcgatacgaagaaggagttttcctttaacgtgcggctgaacggcagcacggagggagccgcggcggcggtccacccgtatgtgcagcacatgacctgccgtgcgatgaacgcccggcgcgtcgatatgcacatcacgctcggcttttcgatttccgtgacggccgtgcgcaggacggagctcgccgagcgcatcgagagcgacctcgtagaaacgcgctgtgatacatatgcggcctccagagctgtcggctgctgcacgcacacgttcattctggaggagaacatcgagctgcaaaacggcaagccgccgatcgaaacggttctgcggcgctgcgtgcggtatcagatcgacagcgtacaggccgcgcagggcgcggtgacggttgcgggccgcgcgtgcgtcgaggttttgtaccgcccgttttccgatgcggcgctgcccgagcgcatggcttgcgagctgccgtttacgcagacggtggaatgtgccggcgccgacgaggcctgcacggtttcggtctgctgcccgggcggcgaatgcacgattcagccgcgggaggacagcgtcggcgagtacacgatcctgaatctctacctgaagccgacgttctgtgtgaagctcacgaggccctgcacggtctgcgccgtgagcgatgcgttttcgatccgcggcgcgctggacgcaaagtataagagcgcctcgctggagcgctgcgagcagcttccggcgcggcagatcaaggtgagcgagacgatcgccattccggacggcgatctcgagcgcgtcattgacctctggtgcgacgggctttcgctttccgccttcaccgaaaaggaaagcgtggccgtgcgcggcaagttcagcgtctgcgtactctaccagacgaaggaaaagcgcgtggcgttcctcgagcgtatgctcgattttaccgacagccgcgaatggccgggagagggcaagctgagcgccgcaggcgagatcaccgccgtgcacttcacgatcacagatgccggcgcgcttgaatgcacggcggagctctccgtcttggaacaggtgcgcagcgtgtacgcagtgcgcgcggtggaatccgccgaactcgacgagacggccgcctgcgacgcctgctgcgccgcggtgtactatgcggccgccggcgagcggatctgggacatcgcaaagcgctatcaggcgcgcgtttcggcgattcaggcacacaacgactgcacggcggatacgctcagcgaggaccggccgatgattatatgccggaaataacgcgcagaaaaaacaggcagaaaggaaagggatgcacgcagtatggaaggttttaacgtatacagggatatgcaggcgcgcacaaacggcgaaatttacatcggtgttgtcggccccgtgcgcagcggcaaatccacatttatcaagaaatttatggacacgatcgtgattccgaacatcggggacgaggcggcgcgcgaccgagcggtcgacgagctgccgcagtctgcctcgggccgcacgatcatgacgaccgagccgaaattcattcccgagcaggcggtcacggtcaagatggacgacacggcggaattcagcgtccgcatgatcgactgcgtcggctatatcgtgccgagcgcgctcggctatatcgaggaggaccagccgcgcatggtgcgcacgccgtggtacgacgagccgatcccgttcaacatggcggcggaaatcggcacgcagaaggttatcaccgagcattcgacgatcggccttgtcatcacaacggacggcagcatcagcgaaatcccgcgcgaggaatatgaggaggccgaggagcgcgtcatcagcgaactcaaggcgacgaaccgcccgtacatcgtgcttttgaactgcgtctacccgaatacggacgaggcgcgccgccttgcggccgagcgctccgcgcagtacggcgtgccggtgctgccggtcaactgcgtcgacatcaccgaggcggatatacgcgagatcctcgcaaagctcctctaccagttcccgatccgcgagatccggctcgacatcccgggctggatcatcgatctcgacgacgaacactggctcaaaaaggagattctcgacagcctcaaggcctcctgcgcgatccagcgcgtgtcgcaggtggaggaggtcaccgcgagccttgccgcctgcccggacctcaaatcggtgcgcgtctcaaggctgaacctcggcagcggctcctgcgttgtggagctgaacccgaagcaggcgcttttcttcaagattctcggtgagcggaccggaatcgaggtggaggatgaaacggcgctgcttcagcacctgatcgagatgaacgagatcaagaagaaattctcgaagctgcaaagcgcctacgacgacgtgatggagaccggatacggcatcgtgatgcccgagatggaggagctctccctcgaggagccggagatcatcaagcagaacggcaaatacggcatccgcctgaaggccgccgcgccctcgattcacatgatgcgcacctgcatcaagacagaggtcacgccgatcgtcgggtcggagcagcagtccgaggatctcgtgctgtacctcttaaaggagttcgaggagaatcccgcgcagatctgggaatcgaacatcttcggcaaatcactgcacgagctcgtcaacgagggcatgcacaacaagctctaccgcatgccggaggacgcccgcggcaaggtgcgcgagacgatcgaacgcatcatcaacgacggctgcaacggcctgctctgcatcattctgtaaaaccgggtctgcttttgcgcgcgctgaagcagacccttttttcttggcgcgaaaacaaacgatggaaatggggggatgatcgatgcaggtttatgaacaggtcacgccggaagagcgcgacgcacaggcgcaggcagccgaaatcatccggccgcacagccgcgcagtgagctggacgctgcttcaggccgttatctgcctgctggttctgcttgcggcgcttctgctccgctcgctgctgccggcggtttacggcgaggcgcgggcgtggtacgacgccgaggtgcagcgctcgatcgttatcacagccgatgacgtttcggatcggtaacgcagaagtcacggcgcgcttcggctttttcgccgtgcttgccgtgatgctctgcctcgacggcggcgcgcatgttctgcctgcgatgctcgcatgcgccgtacacgaaggcgggcatatcgggatggcgcgcctgtgcggcatgcggatcgaggcggtgcgcctgagcgcgctcggcattcagatggtgggggatgcgcgcgcactcagccatctgcgccgcgcggcggtatcgcttgcggggccgctctcgaatctgctggcttttgcgctgcttttgcctctgccgcgcgaatactgcgccgtgcagctcgtcctgtttctgttccacattctgccggctgtcccgctcgacggcggcatggcgctttacagcctgctgtgcagcaccgtggatatgcggcgggcggcgtggatctgcacggcggtctctgtggttttcgctttgctgctcggcacgctcggcttctcgctcctcctgcgcacgcagtacaattttacgcttctgctgctcgcgctgtacattttgctgtatctggttttaaagcggcgggacggcctgtgctgaggcagcgtcgtgggatgctgctcggcgcaggggggcacataagcaaaagggaacggcctcctccggtttggagaaggccgttccctttccgatttttttgagcgggatcaatccagctcgagcgagccggtgtagagccggtagtaggtgcccttttgggcaatcagctcctcgtgcgtgccgcgctcgatgatgcggccgtggtcgagcaccatgatcgcgttcgaattctgcacggtgctcaggcggtgcgcgatgacgaacacggtgcggtttgtcatcagcgcgtccatgccctgctgcacgatggcctcggtacgcgtgtcgatcgagctggtcgcctcgtcgagaatcatgacgggcggatcggcgaccgccgcgcgggcgatcgaaaggagctggcgctggccctgcgagaggctcgcgccgttgccggagaggggcgtgtcgtagccctgcggcaggcgggtgatgaagtcgtgcgcgccggcgagttcggccgccgccatgcactcctcgtcggtggcgtcaagcctgccgtagcggatgttgtccatcacggtgccggtgaacaggtttgtgtcctgaagcaccatgccgagcgagcggcgaagatccgccttcttgatcttgttgatgttgatgccgtcgtagcggatcttgccgtcggcgatgtcgtagaagcggttgatgaggttcgtgatcgtcgtcttgcccgcgccggtggagccgacaaaggccaccttctggcccggcttcgcgtagagcgagacatcgtgcagcacgaccttttccggcgtgtagccgaaatccacatcgaacatgcgcacgtcgccggcaaggcgcgtgtatgtcacgctgccgtcgttatgcgggtgcttccacgcccagatgttggtgcgctccgcgcattcttccagcgtgccgtccgccttttccttcgcgttgacgagcgtcacgtagccttcgtccacctcgggctgctcgtcgagcagggcgaaaatgcgctgtgtgccggcaaggcccatgatcaccgaattgagttggttcgaaacctgactgatgttgccggagaactgcttcgtcatgttgaggaacggcacgacgaggctgatgctgaacgcaaggccggaaatactgacgttcggcgtgttgttgagcaggaaaatgccgcctatgatcgcgacgatgacgtaaagcacgttgccgatattgttgaggatcggcatgagcatgttcgcatagcggtttgccttttcggcgtcggcgaacagcgcgtcgttgatctcgtcaaaatttgctttcgtctcctcctcgtggcagaaaaccttgacgaccttctggccgttcatcagttcctccacgaagccctcggtgcggccgagcgcctgctgctggcggatgaagtagcgcgccgagttgccgccgatcttccgcacaacgaggaacatgaacacgacgccgagcaggatgacgagcgtcatccacaggctgtagtacagcataatgcagaggatcgtgatcacggtgaccgtggaaatgatgagctgcggcatgctctgggaaatcatctggcgcagcgtgtcgatgtcgttcgtgtagtagctcatgacatcgccgtggttgtgcgtgtcgaaatagcggatcggcaggtcctgcatgccgttgaacattttttcacgcatcttggcgagcgagccctgcgtgatcacagccatgagctgcgtataaacgacgccggctacaaggctcagcccgtagaaaacagccaaaatggcgacgaggccgagaatattgccggaaacgctcgcccagtcgccggtctgccagctctgctcgaccgcggcgatgacgttctgcatgaagatcgaggggatggagctgatgacggcattcaggagaatgcacagcagcgtgacggggagaagaacaggataaaagctgaaaagcatgcggatcaggcggagcagaacggttttgcggccgccctttttgacattattcttcatcgctgttttcacctgccttattctgagaagtatagacctcgcggtaaatatcgctcgactgcatgagctcgtcgtgcgagcctacggcgcggatccggccgctgtccatgacgatgatgcggtcggcgtcctgcacggaggcgatgcgctgcgcgatgatgatctttgtcgtttcggggatgaattcgcggaacgcctgacggatcagcgcgtcggtgcgcgtgtcgacggcgctcgtcgagtcgtcgagaatcaggatcttcggttttttcagcagggcgcgcgcgatgcacaggcgctgcttctggccgccggagacgttgctgccgccctgctcgatgtgcgtgtcgtagccgtaggggaactgctggatgaactcgtccgcctgcgccaagcggcaggcttcctcgagctccgcgtcggtggcgtccttattgccccagcgcaggttctccttgatcgtgccggaaaacagctcgttcttttgcagaacgacggcgacctgattgcgcagcgcggtgaggtcgtagtcgcgcacatcgacgccgccgaccttgacacagccctccgttgcgtcgtacaggcgggggatgagctggatcaggctcgatttggaggagcccgtgccgccgattacgccgatgatctcgcccgagcggatgtgcaggtcgacgtccgaaagcgccatcttagaggcggctttcgaatacttgaagctgacgtggtcgaagtcgattgagccgtcgcgcacctcggtgacggcgttttcggggctgtggagcgtgctctcctcgttcagcacctcgacgatgcgctccgccgattcggcggccatcgtgatcatgacgaacaccatcgagagcatcatcaggctcatcaagatctggaagctgtaggtgagcagggaggacatctggccgacgtcgaggtcaagcccgtgcgaggtgatgaccgtgtaggagccgtaggagaggacgaacaccatgacgccgtagatgcagaactgcatcagcgggttgttgaccgccagaatgcgctcggccttggtgaaatccgccttgacgtcctcggcggcagcgtcgaactttttcttttcgtagtcctcgcgcacgtaggatttgacgacgcgcatgccgcggatgttctcctgaatcgagctgttgagcgcgtcgtacttcttgaatacgcggcggaaaagcggcatcgtcttgcggatgacgaaatacaggccgatgccgaggatcgggatcgttaaaaggaagatcagtgccattttgccgcccataatgatgcccatcgtgaaggagaaaatgagcatcagcgggcagcggatcgccgtgcggatgatcatcatgtaggccatctgcacgttggtgatgtcggtcgtcagacgtgtgacgaggcttgagacggagaagcggtcgatattttcgaacgcgtacccttgaattttgtagaacatatccttgcgcaggttgcgcgcgaagccgcagcttgccgtggagcaggccgagcctgcgagagcgccgaaggtcagcgagagcgccgccatgacgatcagcacggcgccgtagccgagcagcacgttcatggagcatccggccttgatctcgttgacgaggttggcgatgaggaacggaatgatacattccaaaatcacttcgccggaaacgaatattggcgtgagcagggagggctttttgtattcccgtatgctctttgccagcgttttgatcataagaacctttcctttccaaagtgtatttcgggaaccgggcgttcccgcagccggtccggcagaaatacagggcgcagcctgaaacggaagccgctccccaagccgtgcggatctgcggcttggggagcggctgcgctgagaggtggcgggctgccggccgcactcccctgtattctgcatgaggacaaagtaaattttacgacgaaattttttaaaaatcaataggaaaggtccaaggttttctaatgaaaaaccaatttcgtagcattcgccaatgtgcggccggatttcttgaaaaagaaaaacaaatcaccctaaataggtgaatgcagggaacaaaaatcagccgcttgattatcgccgaaggaaactttactgccgcgcttcgcgcccgcggcggctattcgtccggcggcgcggcttttcgggccatctgccatgcggcttcctttaatttcgcaaagctcacctcgccgatgacgtgctccagcctgcaggcgtcctgcgccgcaatatcgcaggggaggccggcttctatgagctgccttgtgaaacactggtgcttttcgtagacctgcgcggcggtttgcaggccctgctccgtgagggagagcgcgccgtccgccgctttcaacaggtatttctgtttgaccagcaccttgacggcccggctgacggagggatttttcacgcccaactgctccgccgcatccactttcccatatggtccagaatccgcatccccagggcgtgatttatcttgtggattagtttgtgctaactgcggcggttattatgcaggaaattccggcagccgtcaaccacctgaaagacgtttcaggcaggacgaaagcggcgccgcgcggcttaatttttcaatgtttatctggtataatttccaatattcattagttagagctaatcgaggattgtgccaaaacagataggcatatgccaaatccgcacaggagcgacgcctgtgattgccatacgcaattgtagatgagaccatccggctgccgcagcctatccattttttaccgcatctttcagcagaaatttggggagacgccgcaggccgtataaaggctgctcccaaaagaataattttatgcggcgcttgtgttttacggctgtgtaccggccggagcactcagctcttttcgaggcgggcggagcgtgaaaatcgcttcttccaaagggataagagccgcccggctgtgggggccgcgcaaattcattcggaatccgagttgtggagcggggcgaaatatgctataatagtcccatggcgtgcggaaagggcctgaaacggggcttttcgcacggttttcggtgtgcgggccgcgcgccggagcgaaacagagctgaaaaactacggaaatacaatgggggagatcctatggaactgagcccgaaattggacaggatcctgccgaaggtgcagaagccggggcgctacgtcggcggcgagctcaattcggtcgtgaaaaataaagaggaggtggacgtgcgctttgcgttctgctttccggatacgtacgagatcggcatgtcgcacctcggtataaagatcctttattcgctgatgaaccgcgtcgattacatctggtgcgagcgcgtctttgcgccgtggatcgacatggagcaggccatgctggaaaacggcatcccgctctacggcctcgaaagcggcgacccggtgagcgagttcgactttatcggcttcacgctgcagtacgagctgagctacacgaatattctgaacatgctgaagctctcgggcgtgccgcttctgtgccgcgaccgcacggcgctgaaaaatatcgtcgtcgcgggcgggccgtgcgcgtgcaacccggagccgctgaccgactttatcgacatctttttcctcggcgacggcgagggggtggacctcgaggtaatcgagctgttccgccgctgccgcgccgaaaacaagacgaaatacgaatttttgaaagaggccgcgcagatcgaaggcgtctacgtgccggcgctctacgacgtcgagtacaatgacgacggtaccgtgaagcgctatatcccgaaggacggcgcgcccgcagcggtgaagaagcgcgttgtgaacgacgtggacaacatgtatttccccgaaaccttcgtcgtgccgttcctcgacatcgtccacgaccgcgcggtcgtggaggtgctgcgcggctgcatccgcggctgccgcttctgtcaggcgggctttctgtaccgcccgttccgtgaaaagagcgtggagacgatcaaccggcaggcgaaaagcctgtgcgagacgaccggttacgacgagatctcgctctcctcgctcagcacgagcgactacggctgtctctttgagctcttggacacgctgcacacatggagtgaagacgaccgcgtcagcgtttcgctgccgtccctgcgcgtcgataatttctcaactgagctgaccgacaagatcgcctcggtgcgaaagagcggcctcacctttgcgccggaagccggcacgcagcgcctgcgcgatgtcatcaacaagaacgtgctggaggacgagctcaagcagaccgtttcgatcgccttcaacaacggctggaccaaggtgaagctgtatttcatgatcggcctgccgaccgagaccgacgaggacgtcgccggcatcacgcagctcggccagcaggtggtcgattggtattatgaggccgaaaaccgcgagaagggcaagcgcccggccgtcacggtcagcgcggcggcgtttgtgccgaagcccttcacgccgttccagtggttcggccaggacacgatcgagacgctcgagagaaagcagaagctgctgaaatcctctgtgacctcgcgcaagctgaccgtcaactaccacggcgcggagacgagcttcctcgaggccgtgtttgcgcgcggcgaccggaagctcaacgcggtcctgctcgaggcgcaccgccgcggcctgcgcttcgacggctgggcggactgctttgacttcgacgcgtggatgcagatcttcgccgacctcgaaatcgaccccgcgttctacgcaaaccggcagcgcagcttcgacgaggtgctgccgtgggaccacctcgactacggaatcaagaagtcgttcctcatcgaggaatgcaagcgcgcctacgcggcgcagacgacgccgaactgccgcgaaaaatgttcgaactgcggcgcggcgtgctttaagggagggctgtgcgttgagaaaagatgttagggtctggttttccaagaccggcacggcgcggtacatttcacatctcgatttgaaccgctgcatgtcccgcgcgtttcacaaggcgaagctgccgctgtggtacacggagggctttaatccccacgtgttcctgacctttgcggcgccgctctcgctcggctttgaggggcggcgcgagtcgatggacatccgcctgatcgaggagatgccgtatgcggagctgatcgaaaagctgaacgccggcctgccgcgtgatatccgcgtctacgcggtcacggagccgaagatgaaggggaacgacatcgcgaacgccgaatatgtgctgcgtgccgagacgggcgacccggcggccttgcaggcggcgctcgaggttgtgctcgcgcagccggaactgctcgtgcagaagcacacgaagaagggcgagcggactgtggatatccgcccgtattttgcggacatgcgctttgagccggaggacggctgtctcgcgatgacggtccggctgcctgcgggcaatcagggcggcatcaatccgacgctgttcatcgatgcggcggaaaagctgctcggccgcgccattccgacgcgcgtcgagcggacggggctgttcgacggcagtttccgggaattccaataaacggcaaaataaatagcagacgaaagaagccgcagcaggtgtcaagcacatctgccgcggctttttttgcggcacagagcagaggggggccgtgggcggcacggcggcaatgccgcaggagagagcggcgcgcttttttcggcgaaatgcgggatgtgtgaattctgccgcataatacgcccgcttttccaataaatatttatagattttacagggaggaatgcacgatgacgagcaacaaagccgcagcggccgttctgccccggcggccccttgtggggcgctttctcaaaaatctgaggaagtattggcagtattacatcctgctgctcccggcgctggcctattttctgatcttctgctacgggccgatgtacggggcgcagatcgcctttcggaatttcaacgcgcgggacggtatcaccggcagcgcttgggtgggattcgcccacttcgagcgtttttttcgctcgccgtattttggcagcctgctgcgcaacacctttgtgatcagcatttacgggctgctcgcgggctttccgcttccgattcttctggcgctttccctgaacgagctgaagggaacgaaggtgaaaaagctggcgcagaccgtcacctatgcgccctattttatctcgacggtcgtcatgtgcggcatgctcatcgcgtttttgaacccgaataccggcatcattaacaagctgattgcggcgctcggcggcgagccggtcccgtttctcagcgaggccgcgctgttcccttccatctacgtgtggagcggcgtgtggcagggaacgggctggggcagcgtcatctattttgcggcgctttcgggcgtggacccgcagcttttggaagcggccacgctggacggcgctacccgctggcagaagatctggtacgtcaatctgccggctctgatgccgaccattgtcatcatgctgatcatgaactgcggcagccttctttccgtcggctacgaaaaggcctttttgctgcagaacgccctgaacctcgagacctcggaggtcatctccacctatgtgtataagacggggctggtcagcgcgcagtacagtttttccacggccatcggcctctttaattccgttgtgaacctgattttgctcgtcaccgtaaacgccgtgtcccgcaggatcggcgagaactcgctctggtaaggctttcgggcggaaaggaaggtatgtgaaatgacaggcattgcggtccatccttcgaaaaggctgcggcgcacgcgcggcgacgccgtgttcggcgccgtcaacacggttttcatcgcgctgtccgtgctcgtcacgctttacccgctgctctatgtgctcagcgcctcgatcagcgaccccaataaggtgaattccggcgcgatgtggctgtggccggtggacgttacgtttctgggctaccggaaggtgttcagtaacccggacatttggagcggctaccgcaacacgatctattacacggtgttcggcacgctcatcaatctggcgctgacgctgccctgcgcctacgcgctcgctaaaaagcggctcccgctgaaaaagctcatcaacttcatcattttgtttacgatgtttttcagcggcggcctgatcccgctgtatatgctcgtcaacggcatgcagcttttggataccgtgtgggcggtggtgctgcccacggcggcctcggcctataacattatcatcgcccgcacctttatggagacgacgattccggaggggctggaggaggccgcggagatcgacggatgcgacccgttcaggacgtttttccgcatcattctcccgctttccagcccgatcatcgcggtgatggcgctgttctacggcgtggggcactggaacagctatttcaacgagatgattttcctgagcacgcgaagcaaatttcccctgcaggtgatcctgcgcgagatcattatcatcacgcagatgacgagcagcggtaccgtcacgaatatggaagcgcagacgcaggcgcagatgcagcagcttgccggcgtgatcaagtattccgtcatgatcgtatcgacgctgccgatcatcctcgtgtacccgtttttgcagcggttttttgtgaagggcgtcatgatcggttcgatcaaggggtaagcaaagcgcgcccctttcgaaaataaattcagattgggaaggaagagacagatgaagacaagacagctcttggcgtccgttctcgcatcggcgctgctcgtggccgctgccgccggatgcggcgatggcgggtccgccgccgcggagtcctccgagccgcaggccgtgcagagcggcgctgcggacgggcaaacggatcttgacaacgtcaacgaggaggggtatcctgttgtcaaggaggccatcaccgtcaccatgatgggccagaaggccggcatccacggcgactgggacaaaatggagtttttcgagatcatgcgggatatgaccggcatcaattttgaatttgacacgcccgccagcgaggtgctggaggaaaagaagaacctcgcgctcaacagcggcaattacgcggaggtcctgttcggcacgaatctcacccgcgaccagcaggtgaagtacggcagtcaggggattctgctgccgctcgaggacctgatcgaccgctactgcccgaatattcagacgatgttcgaggagaacgacggcgtgcgcgcctcaatgaccgcgccggacggccacatctacgcgctgggacagctcgcgacgagcccgctcaaggccacggcgatgtgggtcaacatcgactggctggacgcgcttggcgttgatcccgacgacctgcccaccgatgtggacggcctcttcgatctgctcgtccgcttccgcgacgaggacccgaacggcaacggcgttcaggatgaaatcccgctcaacgtgttcgacgacgcggataagggcgacggcctctacaggaatatgatgccgtatttcggcgttctgcacccggaattctatgtggacgacgacggcaaaatccattacggcatgactgacgataacgcgcgggttgcgttcgagtatttcaataagctctgggctgagaacctcatcagccacgacgcctacacgcagagctcggccgatgcgatcgccaagggcgccgagggcctgaacggcgccggtttccacgcgctgcctcgcttcgtgttcggcaacatgtcgatcgagaaggaagccacctacccgatgatgccggctctctccagcgcggtgaacccggagcagacctgcgtcggcggcacgggtatctcgcagggcgttttcgcgctgaccgacaagtgctctgaggagacggccgccgccatgatgcgctgggtcgattacctctacagcgaggagggctcgtggctcatccattacgggcccgaggggcatatctgggaatattccgaaaatgacccgagcctgcacgtgtacatccagcccaccgacggccgcaacgtggaggaggtccgcggcggcgagatcaccccggactgcggcgtgtcctgcccgaagtgggtgcgcgagagcaccgagggcgcgtgggacgatgtgcagcagcaggcccgcatcgcgtggagcgagaagaacctgaacccctatgtgaagaccgcgctgcccgatctgttcctcacggaggaggagcaggccgtgatcgacatgtactacacggatgcgaagaaataccggcaggaaaacgccgcgaagttcgtcgtgggcgacaagtcctttgacgagtgggacgccttcgtcgacggcatgcacagcatgggcgttgaagagatgatcggcgcttaccagtctgcctatgaccgctgggcggaagccaacaaataaagcgggcggaattttttctctgttacgggaggccggccccggcaagatgacgcttcaaatagtttatccagccggggccggctttttaatatcggccgcacgatctgcaagggatatgcggcccattaaaaggagtggtattgcaggatgaagcagcacctttcagactatgtaaacccgtatatcggcacgatttcccacatgctcacttccacaaggccggaggtcatgtacccctacggcatggcgcgcagtacgcccgtggcggacgactgcggcgactactactgcaacgaccggctgcgtggcttttccctcggcgcggcgcacatcatgcccggcatggacggcgattttgaaaacacatttgaccacagccgcgaggattcccgctgctatttccagcgcatagagctggaccgccacggcatcacggcggaaagcacggtcacccgccacgtctatctccaccggtttgcagggcagaacagcctgaagctggtctatccggacggcgaagcctttgcggagcgggacgttgtctgggtcaagctgccgcttgccggaaagcgcgggcgcgtgatgcagtacacctgcgtcaaggtcagcggcggcgtccgaattctcgcgcaggaggaaaacgtgctcgtgctcgccgcgccggaagaaacggtggtcacaggcgccgtttcgctcatctcctttgagagtgccgaaaacagcctgcgccttgaggcggcgggccgaggcttcgacgagctgaaggcgctggcgcagcgtgtctgggacgcgcagctcgagaagatctgcgtgaccggcggcacggaggacaaaaagaccgtgttctacaccgcgatgtaccgcgcgtttcagcgcatgaccgatttcaccgagtacgggaaatactacagcggcttcgacggcagggtgcacgagggcgtgttctacaataacgatggcctgtgggataccttccgctgcatgcaccctttgcagcttctcgtggacgccggccgccaccgggacattctcgaaagctacaacgcgatgtaccggcagagcgggctgatgccttcgttcccgggcgttgagggcgacctgccggtgatgatcggctttcacgcggcgtccctcttcgcggacgcgcaggcgaagggcatcgaggccgattacgagacggcctacgcgggcatccgaaagaacgcgacggagcagtcgatgatgccgtggtgctgcggcgcgccggcgggcgagccggagcgctgctactgggagaagggctttttcccggcgctgaaaaagggggagacggaggactgcccgcacgtccactcctttgagcgccgccagtccgttgcggtgacgctcgagcactgctacgacgattggtgcgccggaaggctcgccgaatcgctcggcaaaaaggacgacgcggagatgtttttccgccgcgcggcgggctaccgcacgctttacaatccggaaatcggctttatggccccgaaatcgatcgacggcgcgtgggtggaggatttcgacccgaagttttccggcggcatgggcggccgggactacaccacggagaacaacacgtggacgtatacatggtccgtactgcaggaccccgagggccttgcggcgctgatgggcggcccgaagcaggcggcggagaagctggaccagcttttccgcgagggcttccgcggggaaaagagcaagtacgtgtatctcggacagtttccggattcgaccggtctgatggggcagttcgcgatgggcaacgagccttcgttccacattccgtacctctacgattattttggcgaaccgtggaaggcgcagaagcggctgcgcgacctgatggacatctggtttacaaattcgcccacgggtatctgcggcgacgaggacggcggtgcgatgtcgagctggttcgttttctccgcgatgggcttttatccggtctgccccggcaaggcggagtacgcgcttggcacgccgcttttcgacagcatggcgctgcacatggaaaacgggaacacgttccgggttgtcagcccgggcgcgggcgacgggctgcgctacatcaaatccgcgcgcctgaacgggcggccgctcgaaaggccgttcctcacgcatgcgcagatcgtctccggcggcgagctcgtgctcgaaatgagccgcattccggcgcgctgaccggcggggagaacgggatctgttcaaaaatataacggtgtgttgcagccgggcgcttcctgtgctatactgtaaaaaggaagcgtccggctgttttgctggccgcggcgcatcggcaggcgtgcgggccgcagcgccctttagagcgcgccgccgggaaatcgaggattttccggcaaaaaatacttgctttttccgcggggatgtgctatgatattgaagcatttgaaatccgtcggccctcacaagctgccgatggggttcgatgcacggtgcaaaccgcgtcattgaagcgggcagtcctctgtgcatgcaggctctgcgggcacacgaatgtctgagtataatttaggaggaaaatcaaatggacgcacttaagatcattgccgccgaatccgtcaaggagcaggcgccccagttcagcgttggcgataccgttcgcgtcagcgtcaacatccgcgagggagagagagagagaatccagcagttcgagggcacggtcatcgcccgcaagggttccggcgtcggcgaaaccttcactgtccgccgtgtttcctacggcgtcggcgtggagagagttttcccgctgcattccccgaacgtgaaggacgtcgcgatcgtccgcaagggccgcgtacgccgtgcgaagctctattacctgcgcgacagagtcggtaaggctgcaaaggtcaaggagcagcttcgataatcgaatagcacacggaataaaaggggcaaagcattgtcccttttttgctttatttgcggagaacagatatatggaaaaagttagcaacaatccgccgatggcgccgtcgaagggcgtgaaaaccctgtacgaatggcttgaggaaattgtcattgcgctcacgctcgtggttcttgtattcacgtttttgttccgcgtcgtcacggtgacgggcgaatccatgctgccgaacttcgtggagggccagaagctgatcgtcacgaatctcggccattcggtcgaacaggggacggtcgtggtcgcgacgaatgttctgagcgagccgatcattaagcgtgtgatcgcgacggagggccagaccgttgacatcgactacgagacgggcaccgtctatgtggacggcgagccggtggacgagacgctgttcggccttgaaaacggcatcacgacgcgcccgtacagcatgctggaagcgatggttttcccgcagacggtgccggtgggctgcgtttttgtcctcggcgacaatcggagcgtctcgaaggacagccgctacaccgaggtcggcatggtcgatacgcggcacattctgggcgaggcggtgttcacgctctacccgttcgaccgcttcggcgcgatcgagtgacggaaaaaggaggcgcagaaaatgagtgaagtacagtcggtgcagtggttcccggggcatatggcgaaaacgcgccgcgcgattcagagcagcttaaagctcgtcgacgtcgtcgcggagctgatcgacgcgcgcatcccggtgagcagccgcaacccggttttgaagggtatcatcggcagcaagccgaagatcgtcctgatgaataaggccgatatggccgaccccgcgcagaccgcgcagtgggtcgagtattttaagcagcacaaaacggtcgcgatcccgatcgactgcaagacgggcagaggcctgaaccgcctgatgcccgagatccgcggcatcctgcgcgagcagatcgccgcgtgggagcgcaagggtatgaccggccggccgatccgcatcatggttgtcggcgtgccgaacgtcggcaagtcatcgctgatcaaccgcctctgtaagggcggcggcgcgggtaaggctgcggtgcaggataagccgggcgtgacgcgccgcaaccagtggttcacgatcggcaagggctttgagctgctcgatacgccgggcgtgctctggccgaagtttgaggacccggttgtcggtgagcatctcgcgtttaccggcgcggtacgcgacgaaattctcgacacggaggggctttcctaccgcctgctcgagctgctgcaaatgctgtacccgcaggcagtcaacgcgcgctacaagacggagatcgacccggccgaaggactcaagggccacgagatcctcgagcgcatcggcagaaagcgcggcatgctgatggccggcggggagatcgacaccgagcgcgcggcggtcaatgtgctggacgaataccgcgggggcaagctggggcagatcacgctcgagccggtgggccggccgctggtataagatatgcgggcggatattatcggatacctcagatgtgaaatccgcaggcgctgtgaaagcgaaggtaattttttcggcatgggctgctggcatcacatccttgcggttgtaaaaaatgcagttgagctggcgccgcagtacggcgccgatccggaggttgtcgagattgcggcgtggctgcacgatattgcttccgtcacagattatgcgctgtatgcggagcatcatatccacggcgcggagatggcgaaggatatccttgcaaaattagactacgatccggagaaaacagcccttgtacagcggtgtattttgaatcacaggggcagcaggcgcatggaaaagcattctccggaggagatctgtgtcgcggacgcggatgccgtgtcgcatttcgacgcggttccgtccctgttttatttggcctttgtgaaccgggacctcggtatagatgagggaacgcagtttgtcgtgggcaaattggagcgcagctataataagctgtccgcgcagggaaagagaatctgccgggactagtataggcgcgtcatggcggctgttgccgggtgcgccgcgccgggctgagtaccaaagcccgattgagcgccggaatggagagaaagaacataaagatggattatacctatgagcatgacgcatacctgcgcggctgcacggcggtgtgcgggatcgatgaggcgggcagaggcccgctggccgggccggtctatgcggcggcggttctgctgccggaggggcttgtgatcgacggcctcaacgattcgaagaagctgagcgagaagaagcgcgagctgctttttccggtgattcaggaaaacgcgctggcctttggcatcggctttgccgatgagaaggagatcgacgagatcaacattttacaagcgacgttcctcgcgatgcgccgcgcctttgatgcgatgcagcggcgctgcgactacgttttgatcgacggcaaccgcatgccgccgatgccggtgcccggggaggccgttgtcaagggcgacgcgaaaagcccgagtatcgcggcggcatcgatcctcgcaaaagtttcgagggaccgtgtgatgctggaatatgcgaagcagtaccccgaatatcaatttgagaagcacaagggctacggcacgaaggcgcacgttgaggcgctgcgcgcgttcgggccgtcgccgatccaccgcaggacgttcctgaagaaaattctgggctagggggcggttttatgccgaacacggcttccggcggggccggcgagcgctttgcggccgagtatctgcgcaaaaagggctaccgcatcgccgcggtgaatttccgctgccgcttcggggagatcgacatcgtcgcggaaaacgggcggtatatcgcctttgtcgaggtcaagacgcgcggcgcggggagctttacgcacccgtttgaggcgatcacgccgggcaagcgcgcgcggatcgtcaaaaccgcgcagttttacctgctcgggcatcccaccggcctgcagccgcgcttcgatgctgcggcggtctttatgcccggagatgcgccggcgcggatcgaatacctcgaaaacgtatttttcggatgaaaggctggggagactatgcagtattttgacctgcactgcgacacgcttgtggaatgcctgaacaagaaggcgtcgttgctgcacaacgacctgcacgtcagcgtggaaaagggcgcgcattttgcaccgtacatccagtgtgcggcggtctggctgccggataccgtgcgcggcgccgctgcattcacgtattttgagcgccatgccgatttctttgaccgcgcggcggagagcggcgcgttccgcgtgatccgcaccggcgccgatattgcggcgatggagaacacgcggggcgtcgggctgatgctcaccgttgagggcggcgcggcggctgccggggagctcgggaacatcgcgcgcatgcgtgcgcgcggcgtgcgtatgatgacgctcacgtggaacggcagcaacgagatcggcagcggcgtgctttccggcgacacgttcggcctgacgcccttcggccggaaagccgtggccgagctggagcggcagggcatcgtgatcgatgtctcgcacgcgagcgagcgccttttcgacgacgtggcggcgcatacatcgcgcccgttcgtcgcctcgcactcaaacgcaaaggcggtctgcggccacgcgcgcaacttgacggacacgcagttcaaggtgatctgcgcacgcggcgggctcgtcggcctgaattactacaaggcatttctgaacgatgcgccggaaaaggcggatatcgaggatatttttgcacacgcggagcattttctcgcgctcggcggcgcggatgcgctcgcgatgggcagcgatttcgacggctccacgatgccgcacggcgtcacggggctcgaatcggtcgagtcgatcgcggaggttttcctgcggcacaacctttccgaggggcttgtgcggaaaattttctttgaaaatgcggcttcttttttcaaacgctttgacacaggagcctgaatacagtataatggggttgcccggaaaccgggaaccctcaatgaatggaggctcacgccatgatgtataaaagtacgcggaacgcagcgctgcgcgtgacggctgcaaaggccatcgcgcagggcatttccgacgagggcggcctgtttgtgcccgaagcctttccggctgccgacctcggcgaaatgctgccgctcgattacatcggccgcgccgagtatgtgctctcgcgctttctgacggattttaccgccggggagatcgcggagtgcgccgcgcgcgcctacagcccggaaaaatttgagaacggcagcccggcgaaggtcgtttcgctcgatgcgcacggggaaaacaagcacgttctcgagctttggcacggcccgacctgcgcctttaaggatatggcgctgcaaattctgccgcacctgctcacgaagtcgctggaaaagacggcggacggcaaaacggcggtgatcctcgtcgcgacctccggcgataccggcaaggccgcgctcgagggcttccgcgatgtggcaggcaccgaaatgatcgttttctacccggaaaacggcgtcagcccgatgcagaagcgccagatggacacgcaggcgggtgaaaacctctgcgtctgcgcgatcgagggcaattttgacgacgcgcagaccggtgtgaagcgcatctttacggatgaggccgtcaaggctgcgcttgcggcgaagggaaagatgttctcgagcgcgaattcgatcaactggggccgcctgctgccgcagatcgtctactacttctccgcttatctcgacctcgtgcaggcgggcaaaacagcgatgggcgccccgatcaacgtcgtcgtgccgacgggcaatttcggcaacatcctcgcggcctactacgcgaagcgcatgggcctgcccgtgcggaaattcatctgcgcctcgaaccgcaacaatatcctgacggatttcatccgcaccggcgtatacgaccgcaaccgcggcttctacacgacgatttcgccctcgatggacattctggtctcgagcaacctcgagcgccttttgttccacctctgcggcgaggatgataaaaagctggcggcgtggatggaggcgctgcagagcggcggcgcctacacggtggacggcgatacggcggacgcggtgcgcgcgctgttttgggccggctgctgcgatgatgcggagacggtcggcgtgatccgcgacgtatttgcgcgcgacggctacctctgtgacacgcacacggcggttgcgatgggcgtgtacgcacagtataaggcggagaccggcgacgatacgccggcggtgatcgcctctacggcgagcccgtacaagttctccgacagcgtccttgatgcgttcagctgcgagaagccggcggacgaatttgagaaggccgcgctgctctcgcagctctcgggcacagcggtcccgcagccgattgaggcgctgcgcggaaagcccgtccgctttgagaaccgctgcgctgcggacaaaatggcggacttcgtgctcgaaagggtcggggtgtaaggcgcatggcactgtacgcgatcgcggacctgcatctctcgctcggcacggacaagccgatggacgtgttccacggctgggaaaattacgtggagcgattggagaagaattggcgcgcgctggtgacggcggaggatacggttgtggtggccggcgatatttcctggggaatgcggctggaggagaccgtgcgggatttcgcgtttctcgagagcctgcccgggaaaaagctgcttttgaaggggaaccacgactactggtggtccacgcgcagcaagatcgagtcgtttttcgcggcgcaggggttccgctcgatggagatcgtattcaactccgccgtgcgcgtcggcgatattgcggtctgcggcacgcgcggctggctctacaacgcggaaaccgcggaggataagaagatcgtcgcgcgcgagaacgggcggctgacgctttcgctggaggccgcgcagaagctcggcggcaagccggtggtgtttctgcactacccgcctgtctatgacacggccgaatgcgcggcgctgctcgatacgatgcagcgcttccgtgtgacggactgctactacggccacatccacggcgaccgcgcggcaaaaagagcgccggtcggggaataccgcggtatccgcatgaatctcgtttcgtgcgactacatccgttttgttccgaagctcgtccgcatgcacgcagactgtgaataaattttaaaaaatgagtttattatctggcatattgcgccggtgtgtgctataattgatttatatggctgaaaaagccaattgaatacgcaataaaactgagaggatagaaggaaatgaacttaaaggcaaccaacaagaccgagacaaacaagtacgagctggaaattgagatttccgcagaggatttcaataaagcgatcgacgaggttttcaagaccgagggcaagaagattgcaatcccgggcttccgcaagggcaaggcgccgaaggcgttcgtcgagaagtattacggcgagtccgtgttctttgagggcgcggtggacaggctgtaccgcccggcgctgatggacgccgtcgaggcctccggccttgaggtcatcagcatcggccaggccgacattaccgaggtcagcaaggagaacggcgtgcagatgaaggtcgtcgtcgtcgtaaagccggagatcacgatcgagggctacaagggcatcgaagccacgaagaagaaggctgaggtcacggacgaggacgtcagcgccgagctcgtcaaggtgcaggacagaaactcgagaatggtcacggtcgaggacagagcggcgctcacgggcgacacggcggtcatcgatttcgagggcttctgcgacggcgaggcgttcgagggcggcaagggcgaaaacttcgagcttgcgctcggctccggccagtttatcccgggctttgaggatcaggtcgtcggccatgagaccggcgaagagtttgaaatcgccgtgaagttcccggaggagtatcaggcggagaacctcaagggcaaggacgcgacctttaagatcaagctgcacgagatcaagcgcaaggagctgccggtgctcgatgacgagttcgcgaaggacgtcagcgagttcgacacgctcgacgcgtacaaggagagcatccgcgagaagctccagagcgaccgcgagaagtccgctgaggccgatgtggagaaccagatcctcgaggcgctcatcgagaaggtcgagggcgaaattccggacgagatgtacgacaacgaggtcgaggagagcatcaacagctttgcctaccgcctccagtctcagggcctgaacctcgagacgtacctcaagtacaccggcatgaacaccgacgcgctcaaggagcagtttaagccgcaggcggagaagcaggtcaagctgcgcctcgcgctcgagaagatcgcggcgaacgagggcctcgagccgaccgaagaggagctcaacgcggagtacgagaagctcgcaaagacctacgagatggaggtcgacaagatcaagaatattgtcgccgaggcgcaggtcaagggcgatcttcagagccagaaggccgtggagtttgtcaaagagaatgccgccgtcaagtcggaggaataatttagcaatttacaggtaagtatataaaggtgatcgcaggccgcccgctgtcccgtcgacagcgggcgctgcagaacccgcgtttcagaaaggagttcatacaatgagtttagtgccttatgttgtcgagcagacgagccgcggcgagcgttcctacgatattttttcgagactgctcaacgaccgcatcatcatgctgaacgatgaagtgaacaacacgacggcgagcctcgtcgtcgcgcagctcctctacctcgaggggcaggacccggacaaggacatcagcctgtacatcaacagccccggcggcgtcattacggccggcatggcgatttacgacacgatgcagtacatcaagtgcgacgtttccacgatctgcatgggcatggcggcctcgatgggcgctttcctgctcgcggccggcgcaaaaggcaagcgctttgcgctgccgaacgccgagatcatgatccaccagccgtccggcggcgcgcagggtcaggcgacggacatccagattcaggccgagcgtattctgcagatgaagaagagcctgaatacgatcctcgccgagcgcacgggccagacgtatgagacgattgcgcgcgacaccgaacgcgacaactttatgacggcgcagcaggcgatggaatacggcctgatcgacaaggtcatcgaaacgaaatcgaagtaaacgaaagggcgtgagagcatgccgaacaatttcgggaacgaaagtgatctgcgctgctccttctgcgggaagccgcagtctcaggcaaagcggctgatcgccggcaacggcgtttatatctgcgatacctgcgtcgagctctgcatgaacatcattgaggatgaggatgcactgcagcgcggcaaggtatccgtgaaaagaacgaacggcgaggaggagaaggtgctcccgaagccgcaggaaatcaagaagatgctcgacgcgtatgtgatcggtcaggacgacgccaagatgacgcttgccgtggcggtttacaaccattataagcgcattttcttcaacagcgaggagaacggcgtggaggttgcgaagagcaacgtcctgcttctcggcccgaccggcgtcggcaagacctatctggcacagacgctcgcgaagctgctcgatgtgccgttcgccattgcggacgcaacgacgctgaccgaggccggctatgtcggcgaggatgtggagaacatccttctgcgcctgattcaggcggcggactacgacgtcgagcgcgccgagcgcggcatcatctatgtcgatgagatcgataagatctcccgcaagtcggagaatccctccatcacgcgcgacgtgagcggcgagggcgtgcagcaggcgctgctcaagatcctcgagggcaccacggcgggcgttccgccgaagggcggccgcaagcacccgcagcaggaggtcatcaacatcaacacgtcgaatatcctctttatctgcggcggcgcattcgacgggctgaaatccgtcatcgagcgccgcacctcggcgcagacgctcggctttaactcggatgtgaagagcaaggcggagctcgataatacggagtggatgaaggaggtcacgccgcacgacctcgtgaaatttggcctgatccccgagcttgtgggccgtcttccggtcatcaccgcgctgagcgacctcgataaggccgcgcttgtgcgtattctgacagaaccgaagaacagccttgtgagccagtacaaaaagctgtttgcgctcgacaaggtggagttggcctttacgccggaggcgctcgacgcgatcgccgaaaagacgatcgagcgcaaaacgggtgcgcgcggcctgcggtctatcctcgagggcacgctgacgaagctgatgttcgaggtgcccggcgattatacgatcgaaaaggtcacgatcacgaaggatacggttctgaataatgctgcgcccgaaatcgagcgcaacccggaacgcatcccggtcaagatcaagatgacgcagcccaagcggcgcgcccgcaaggattcggcatcttaatcagtcatcatacaggctgtgcggtgagttatgctgcgcagccttgtctgattttaataaggaatgattcaatatgagcaaaccaaccggcagcgctgagctgcgaaccatgccggttctggcggtgcgcggcatcgtcgtgttcccaggcatgatcctacagtttgacatcggccgaaagaaatcggtgctggccgttaaggccgcgctggacgcaggccgtgaaatcttcatcgtcacgcagacggacctctcggaaaacgagccgacggcggacgacctctataaaatcggcgtggtcgcaaaaatcaagcagatcgtccacacctcggacgagggcatcaagctgcatgtggagggcgtttcgcgtgccgagatcatggcggtcgtgcaggaggaaccgttcctttcggggacggtgctgccgtgcacggagccgaatttccgcacgagctataagaccgaggcgctcagccgcatcgcgcaggagaaattcgaggagtatatccgctggttccgccatgtgccgccggatattttgctcggcgtgatgcagcagaaggactgcggcaagctcgcggatttcattgccgcgaacattgcgctcgatttcgaacagaagcagtgcattctcgacgagctgcacccggtgcgccgcatcgtgcgcctgaatgcgattctcaacgatgagattcaggtgatggcgctcgagcgcgagatctcgcagaaagcgcaggagcagatggacgagaaccagcgcacctacatgctgcgcgagcagatgcgcgcgatcgcgagcgagctcggcgaggaggacaacccgcaggaggaaagcgacgcgatgcgcgagaagatcctcgcgctgaacatgcccgaggccgcaagggaaaagctcctcaaggaatgcgaccgcttttcgaagatgccctacggctcgcacgagggctccgtcacgcgcgtctatctcgagacgtgcatcgacctgccgtggaacacgtcgtcgaacgagcggctcgatctcgtgcgggcggagaagattttgaaccgcgaccactacggcatgcagaaggtcaaggagcgcttcctcgagacgctggccgtgcgcaggctttccgacaaggcgaccgggcagattatctgccttgtgggcccgccgggcgtcggcaaaacctcgattgcgcggtcgatcgccgaggcgacggggcgcaaatacgtgcgcgtctcgctcggcggcgtgcgcgacgaggccgacatcatgggccaccgcaagacgtatgtcggctcgatgccgggccgcattatcgcggcggtccggcaggcgggcacgaacaacccgctgattctgctcgacgagatcgacaagctcggccagagtttcaagggcgatccctcggcctcgctgctcgaggtgctcgaccctgagcagaacaacgcatttcaggaccactacatcgacttgccgttcgatctgagccgcgtgcttttcatcacgacggcgaacgacgcgtcgatgatcccggggccgctgtacgaccgcatggatgtgatccagctcggcagctacacgcacgacgagaagttccacattgcctccaagtacctgatcccgaagcagctcaagaagcacggcatcaaggcggcgcagctccgtttcacgccgaacgcgctgcacgcgctgatcgacagctatacccgcgaggccggcgtgcgcacgctggagcggacggtcggcacgatctgccgcaagatcgcgaagcgcatcgtctccgacccggatttcaaatccttctccgtgaaggcgcagaatctggaggagctgctcggcccgaagaagttcacaaaggagaatctcgagaagcaggatgaggtcggcctcgtgaacggtctcgcgtggacgagcgtcggcggcgagctgctgccgatcgaggtcgccgtgatggagggcaccggcaagatccagcttaccggttcgctcggcgacgtgatgaaggaatctgccagcgcagcgctgacctgcatccgcacccgtgcggagcagctcggcatcgcaccggatttttatgcgaaaaaggacatccacattcacgcgccggagggcgccgtgccgaaggacggtccctcggcgggcatcgcaatggcgactgcgatcacctcggcgctgtgtaaagttccgatacttcacagtgtcgcgatgacaggtgaaatcactttacaggggcgcgtgctgccgatcggcggcctgcacgagaaatcgatggcggcgtaccgcagcggcatcaagactgttttcatcccgcaggcgaatgtaccggacctcgcggaggtcgacaaggtcgtgaaggatcacgtggagttcattccggtccgccggattgatgaggtgcttccgaaggcgatgcccggcattctgggcggcgagcacagagcggagccggaggtgctcgtgcccgtcggccagacgcagcgcgttatgcccgcgctgcagcagtgaggtgcagcatgaattttcaagccgtggaatttgaggcggccaccggccgcgcggaccagctcaagcgatcggagctgccggagatcgtattttccgggaaatcgaacgtcggaaaatcttcgctgatcaataagctcgtcaaccgcaaggcgctggcgcgcgtcagcgcgacgccgggcaaaacggcgacaatcaatttctttcgcctgccggactgccggctcgtcgacctgccgggctacggttacgcgaaggtttcgcagagcgagaagcagcgctgggcgaaactcatgcagggctatttcgacggcgaacggcggattgccttagtcgtgcagatcctcgatatgcggcatgcgtcgacggccgacgattttgacatgatcaattttttgatcgagcgcgacctgccgtttctcgctgtctgcaccaagtgcgacaagctgaacaagacgcagttcaatgcacaggtgaaatactttacagagcttttcgaggagcatgaaatcccatttatcccgttttcctctcagaccggcttcgggctggacgagctgaaggcccgcatcgaagcggccgtcggggaatgcggggaaggctgaaaaagatccggaagggaatgagtgaaatgtttgtatccgattgcctcggtgtgaacaaaagggggcatttgaccatcagcggctgcgacacggtcgagctggccgcgcagttcggcacgccgctctatgtgatgagcgaggataagatccgcgatacctgccgccggtataaggcctcgatcgaacggcactacggcggaaacggcgcgccgatctacgcgagtaaagcgttcagctgcaaggagatctaccgcatcgtgaccagcgaggggctggatgtggaggtcgtttccggcggcgagctgtttacggcgctttctgcgggcgtggatgcaaagcacatccatttccaaggaaataacaaatcggtgcccgagctgatctacgcgatcgaaagcggcgtcggcgacatagtggtggacaactgcacggagctgcggcgcatcgagcagctttccgcagagcgaaacgttacggcgcgcatttcgatgcgcatcaagccgggcatcgacgcgcacacgcacgagttcatccgcacgggtcagatcgattcgaaattcggctttgcgctcgagacgggcgaggccttcgaggcggtgcgcgaggcggtggcggccgagcatgtggagctgaccggcctgcactgccatattggctcacagattttcgataaatccccgttcgtgcttgcggcgcaggtcatgctcgggctttacgaccggattcatagggagctcggcaagaagctcacgcacctgaacctcggcggcggattcggcatcaagtacaaggattcggacgccgcggtgccctatgaggattacatgagcgatgtttcggctgcggtgcatgccgcgtgcgcgcagtacgggctcgagatcccgcgcatttacatcgagccgggccggtcgatcgtcggcgaggcgggcatcacgctgtacacggtcggcgatatcaaggcgatccccggcgtgcgtacatatgtggcggtggacggcggcatgttcgacaacccgcgctatgcgctgtaccagtccgattatacgtgcctcatcgcgaacagggccggcagcccggccgacttcaaggcgacgatcgcggggaaatgctgtgagagcggcgacctgattcaggagaacacgatgatccagacgccggagaccggcgacattctggcggtgctctccacgggcgcgtacaactactcgatggcctcgaattacaaccgcaatccgcggccggcctgcgtcatggtgcgcggcggcgcggcgcgtgtggcgatccgggcggagacgtacgccgatctggtccgcaacgacatataagaaatataaattatttttgaattctttgtttttggctttacttttttgcttttgaatgataaaataaaaaagcaatattcgggatgtctcgtattatttcaagaaaagagggtttgttatgaacacgaagctccatgacgagaacgtagattttctgttcgatgcgattctggcgctggagacccgcgaggagtgctaccgcttttttgaagacctctgcacggtgccggagctgaaggcgatgtcgcagcgcattgctgtggcgaaaatgctgagcgcacggcaggtgtacagcgaaattgtgggggagacgggtgcatctacggcgacgatcagccgcgtaaaccgctcgctgaattacggcagcgacggctacacgctggttttcgaccgtctctggaagaagaagggcgagggcgacgcggagtaatggcgggctacgatgtatttgcacggtattacgatgcgcttacggcgaacgtagattacgccggccgcgcggtctatctgaaagcgctcctcgagcgcctcggccatgcggctggccttacgctcgacctcgcctgtgggacaggcagcctgacgctggcgcttcatgcgctcggcttcgatgtctatggtgtggacggctccgctgctatgctctccgaggcgaaggataaggcctatgaccgcggtgcggacattctgtttctctgccagaaaatgcagcgactcgacctgtacggcacggtcgacacggttttctgcgcgctggacagcatcaaccacctttccggcccggagcaagtgctggagaccttccggcgcgtcgcgtttttcctgaacgacgacggctggtttattttcgatgccaatacgccttacaagcacgagcatgtgcttgcggacaacacgtttgtttacgaccttccggatatctactgcgtgtggcagaacacgtacagtccgcaggacgggagcgtggcgatcgagctcgatttcttcgagcggcaggagaagctgtatgcgcgcagcagcgagcgcttttccgagcgagcctacagcgcggagacgcttacggcgcttctgcgcgaggcgggcttcgaccgcgtcgaggtgttcggcgacatgcgcttcgacgcacccgtgccggacgagcagcggatggttttcgccgcgcatatcacaaattcacaaaacggcgttttcgcgggctgagctcggcagaagcgccgcgaaaggatgttacacttggacagaatcatacgctgcatcacttccgacggcgccctgatggcctcggcaatcgattccagcgatacggtatacacggcgcagagcctgcacggcctgagcgctacggcggccgccgcgctcggccggctgctgaccggcgcttcgatgatgggcgcgatgctcaagcaggagcatgcctcgctgacgctgcgcgtaggcggcggcggtccgctcggcacgctgaccgcgatctcagatagccggggcaatgtgcgcggctgtgccgaccaccccgaggcggaggtgccgagaaagccgaacggcaagctcgacgttggcgcggcggtaggctgtgcgggccggctcggcgtcatccgcagctacggtacgggcgagccctatatggggcaggtggcgctcgtcagcggtgagatcgctgaggacattacgaattactatgcggtgagcgagcagatcccgacggtctgtgcgctcggcgtgctggttgattcggagacgaagaaggtcatgctggccggcggcctgcttttgcaggtgctgccgggcgcgctgccggaggatgtcgaaaagctcgaggccaacgtgcagaagctcgagccggtcacgacgatgctcgcgaagggcatgacggcggaggaaatgtgcgcgaaggcgctcgagggcttttcggtggagaagcttgacgagatgccggtgcactacgcctgcacatgcagccgtgagaaatactatgcggcgcttgccacgctggagcctgacgagctggagacgctgcctgcggtggacggcaaagtggaggcggtctgcccgtactgctgccggaggtattatttcacgacggacgagctgcgcgagctggcggggcagatgcgtgaaaaacaggcggaggcgggccggtaaatttttgaaaaaaacttgaaaaaaggtcttgacttttccgtttgttcgtagtattatataacacgtcgctgagagatgaacgcacaagcgatgctgttgtgggggcatagctcagctggttagagcacctgccttacaagcagggggtcataggttcgagtcctattgtccccaccaaaatgtggcccggtagttcagctggttagaacgctagcctgtcacgctagaggtcgacggttcgagcccgttccgggtcgccacatttgcctctgtagctcagttggtagagcaggggactgaaaatccccgtgtcattggttcgattccgatcggaggcaccaatatgcggacgtagctcatctggtagagcgccaccttgccaaggtggaggtagcgagttcgagcctcgtcgtccgctccaaaaagaaaaaggcgcccctagagcgcctttttcaaaatctggtgacatagccaagtggtaaggcgtgggtctgcaaaaccctgattccccggttcaaatccgggtgtcacctccaaaattttttcttaatgtatgcgcacagtaggatgtactgctgtgcgcatcgattaagaaaaaaccagtacggagtaggagtccgtattgattatttctgagtttattttgtccttgcgtcgatgtcgcttcctgaggcacagccagttttgtccgcctgtgtaagtcctcgtatttctcacaagcagagatgcgcggctgcggcactgatttgctgtgagtatccccatcgaaggctcatgtagttttcaaggaacaaaatgaaaaggctttccagattgtgcaatccgaaaagccttgcaaagtcgtaatttatgtggtacaatagccacgtaaatccaatcgtccgatatatcgcacgactgactatggaagttttcagatgcctgtacatctggaaccgcctgtttgatctggtaaatcagcaagcggcctagcctcgtccgagtatgtcggacgattttcatttgtctctattataacgggtctcttttttggtgtcaatatgccgttcacaaaaaattttcatgcggcggcaacggctgtaatcgataaaaagaagaaaacattcaaaaagcggcaatgttgccggtttttacaatgcagcctcaaaacaccggcaggaacgcccgcctatactaaaagcggcaatgttgccggttttttaggctctgtgttgcagagagattttataaacttgacgttgcaggtattcaaagtccggatgcacgtagtgctgaagcgtaaattgcacggttgtgtgtccaagtaaaagagaaacgcttttaggatcagcgcccttttcaatcaagcgcgttgcaaaggtatgccggagcatatgcggggttatatgccggaggccagctgcacgggcaaccttattgcaaatgtgtcggaaatgcgttttacatacaggatttccgtcgtgttggctgataatatagtcgtctggtcggtgcgcggagcgaacgtgcaggatacaaagcatgctttgtacttccggaataagcggtaattgtcggataccggcaaccgttttacttgtccgaatcgtgaggattctgtttttctgattccaatcaatccactgaagaagacgaagctcgtcgcgtcttaatccggtcaggagaagaattctcaaagcgtaatcatcgatgagggggagaacagaaagatgtgcttcaaaagcagactgttcttctgcggtcaaaggcgtaatctctttttccctggcattcttgggaagctctgtgccctgaatcggatttgcaaaggtgatacccgcctttttggctgctttatagctttgattcatcagtatccgcatatgccgaagtgtggatttagcatatttgtcaatcaggctgttcaacatactttcaaattctaacgcagttagatcagttagcctacgctgcataacatcgggatattcgaggtataacctgcgcaatgcgtcccgatatattttcatggtgctgtcttttcgggatggctgcgcatagttctcgagccaatttgtaacccattctcctattgtgtattcttttttcggctttttcataggtaaaccccctaatagaaatttgccggacatatatccggtaaagtaaattctagcattaaagggaatttatgaaaaaagcggcaatgttgccggttttcggcgtggcctgaagaacgccggcaagaggttcgctctgttgtggttgttgtggtcaagcatttttgtaacaccagtgactaaaaaatatcgtttttcggctatgctgccgttcgtgcttcatatgaattgcgtaaactgaaataagaatacaaatctggctctcttatttcaaattcagtaattaacttaaaataagtatttttgacgtacagatggaaaagttaatttgccaataaagtttctggcgtttaatgtcgaaaactaaaataatttataaactttcagactttcaagtctaaaagtattgattttttcggatttctgagtataataaagataagaaatttaggaggtgcgtcatggctgaacttataaatcgccctgagtatttagaacagctcattcaaaataaagatgtggatctggttaaaatcgtcaccggcatccgccgatgcggaaaatcatccctgctggacctgtttcatcaatatctgtccgataacggagtatccgaggcaaacatcattcacatgaatatggagtcactgcgttatcgaaatctttctaactatcttgttttctatgactatgtcagtgaacgcatagagaagtctggaaagacctatcttatatttgatgaactccaagctgtagagcattgggaaaaagcaatcgagtctttccgtctcgactttgatgtggatatctacatcaccggctccaatgcctacttgctttcctcagaattttctactctgctttccggcagatatgtagaaatccgtatgctaccgttgtcatttaaggagtttctgactttttacgaatttgagccttcagtcactatagaagaaaagttccagcgttacctgcaattcggaggtatgccaattctgagagaatatcagtttaacgaggcaagaagcaatcaggccttggagggcatctattccactgttgtactgcgtgatattcttcagcgcaacaatcaggctgatcagggaatgcttcagaaaatcatgctgttcctttgctccaacattggtagcattacttctcccaacagcattggtaatgttctctccaatgaaggcgatattcaaaccgggaaaggaaaaaatgtcgccgggaaaacggtggacaaatacattgccatgcttcgcagtgcttttattttctactctgtaggcagatatgatgtcaagggcaagcagctgctgaaaacattaggtaagaattacatcatcgatatgggtttccgcaatatgctactcggttaccgtgatgtagaccgaggccacattattgaaaacatcgtgttcttggagctgattcgtcgtgactaccgtgtctatattggcaaggtcggagagacagaaattgactttgttgcggaaaagccaaatgataagctgtatatccaagtaacagaaagcatgcagtcgccagaaacccgtgaacgtgagttaaggccgctgcgcatgataccggacaactacgagaagatcgtactgtcgatggatagaaactatatcaattcctacgatggcatcaaatccttatacctgattgattggctactatcctgagtacaagggacacattcccttactcttaaagttattcccttaaaatagacctgtttttaaggggagcaattcataattaagataaagcattagggatgagcaaaacataggttttgctcatccctatataagattcattatatcttattagccactcccgttacaactttagtgtagcactttaaataccggcaagaggccgcctctataaagagcggcaatgttgccggttttcggcatgcctgagaatgctgacagaagcctgcacttacgaaaaagcggcaatgttgccggttttcggcatgcctgagaatgctgacagaagcctgcacttacgaaaaagcggcaatgttgccggttttcggcgtacctgagaatgccgacaggaggcccgctcttacaaaaagcggcaatgttgccgctttttgtacctgaacaagtaactattggcggactttggatgaaataaaaccggttggattgattgatccagccggtttgaagtagctcatgcccttgtttttggtatgtacgggcgggaatttcagcatatactgttcgccctgatagataacggaaattttgtttccattcgctcctgcatacgttttattgcgctgcggcatatggataaaatcaaaatcaccggcatggccttatatcctttccattctcaaatacttctcgcgcagataccaagcctgttctgtgctgatctgcccgtttgtttctgcgatattgatgtcgctttgcagattacagtaatcgcagtcccaacgcagatacttttcaccgttgtcgagttttttccatgcagcgtccatctggcgcacggactcccaaaggaacacagggaggccatgttccagatagcttttatccttcggtaaaccggttttatcgtcatatggggaagctaatgacataacatcctccatgcaataggattgattttagatacaaaatgcggcgtaaagaggaacagtctttttattatcctcgaagccaaagttttttgcagagagtttgatggcgtaagcaggcttgtaggtttccatataaacctttaagctctttgcccgtgtgttgtcggcagacttgacctcaatgggaataagctcaccgtcacgctgaatgacaaaatctatctcagctccacgctcggactcccaatagtaggtcttatatccgttaatggcaagctgcacattaacatagttttcagccataccgcctttaaagtcattcagttcctcgaccatatagagaacatcatttgccgctaagtctttctttgcacagagcagtcctaagtcggaaacataaattttgaacgcatcaatgtcacgatagttctcaaggggcttttttatctgctcaaccttgtaaacctgcgacacgatacccgacaggcaaagccattcgatagcgttttcaaactcggaagctctgccgccttttttaatcagcttatattggaaacgggtatttttcttggaaagctgcacggtgatgttgtcataagcaagccttgtttttttgatttcgttcagattgttatacttgctcatatcattgagatagcttgccagtatagtatcctgcgtatggcgcacaaggatataatcctttgtctccacaaactgcattacgcattcaggcataccgccggcgataagatattgacggtaaagctgcattgccgcatcgtgcaaggcagagggtaaaggtgtatcctctgcaaagcatttcttaatctgctccacaagggcgctttcaccgcaggctaccataaattcctccatatccataggatagagggttttcatatccaccttgcctacggggaatgagaacttcgctctgttcactgcaacgccgagcagacttcccgctacaataatatgataatcgggagcgtcttcgcaaaagtatttcagagaagttaaagcccgttcgcaaagctgtacctcgtcgaatactatcagcgttttttcctttactatcgtttgccttgcaatgtgtgacaaaatgggtatcagataatcgggactgatattttcctcaaaagtttcattcagctttggattggtttcaaagttaaaatacgccacattctcataacaggtgcgaccaaactctaaaatggaataggttttaccgacctgccttgctccctgtaaaataaggggtttacggtgttcgctgtctttccacacttctaaaaagctcataatttttcggtacataatcagacctccttcaaagtgctaattatagtatatcaaatattcgtgtaaatatcaatgagtttttctttgaaaattacactataatacacgagttgctttgtgagcgtaaaaacgttcggcgacttgtgcaggaagaaaacttctgtcaaactataagagtctgaaataatacaaggtagtacgggatagcatccgagactccaagatagtgagtgcaggtatggaacaaattctcttatgtaccaagcgttttcactcggcggtaaaaggtgctgggagacatgttaagacgctgctgcgcctgaacggcggtgatctttccggcgcgccagagggtacagacagcccggaaatttttctcgtcggtatcgatctgcgggcggcctttgagacgtccttcccgctttgcaatcaacatgccttccttggcgcgctgacggatgcagtcgcgctcaagctgggccagagcgccgaaaaccgtcaacataaactgcccctgcggcgtggcggtgtcgatggattctttaaggctcataaatgcgacgccctttctttgcagctcgtctatgatgaacagcaaatcccgtgtgttgcgcgcgatccgcgagatgtcagagcataccaccgtgtcgccctcccgggcaaaggcaagcatggccgtgagctgggggcggtctttgtttttgccggaagccttatcgatgaaaattctgtcagccttgtgcagcttggcatcttcgagctggcgtgcctcattctgctcggctgttgaacaccgcacgtaaaaaataatcatgtctgctgttcctcctctgcatgctgtgtgccaaaaactataccttttgacacacccaaaaatcgtgtgtcaaaaaccatgttttcctacttttgatatatgccaaaattacaggagaccttttgagagaaaaacaagcatcgacggatggccgatgcttgctttgtatgatgtacatattcaattttgggatgtagctccaagcacattgtctatgtctcgtccgccatacatgacgcggataacggttacaatccttttatcagaatccgggatatagaagacaatgaaattgtctaccggcatcatcctgagacctcgagagttccatggctccttatcgtaaggcttaaagcgttggggcatttgaaaaagagccgaaattctatcttccagtcgattcaaaagccggacagcgttatctggtgccagcaaagaaaaagccacgtattctaaaatctctcgaagatcgttttcggcctgatctgtcatctcgatacgataggtcataggctataatccttacgaatctcagaaaatactttgtctgccggtttggtgtacccttcctgcatgtccaagtaccctttctcgagttctgcatgaagctggtcttcgttcagttcttcaatctggatcggttttccagtcggaagtttgacctcgaaggggagtccgcgctgaaggatgatctgtttgtagaatatgttgatcgcgttcgaaacaggaatccccagcgcagagaggatgtgctctgcctgctcttttacatccggctctattcgggcatagaggtttgctgtttttgctgccattacctagaactccttccatgatagattcaagcatattctatcatattgtacgcacaaaagcaatacaaatgctcttgaaattaaaaatccagtgttttttaaattccttcccggattttctggctcgatacttgacaagttatgcaagtaagctctataattaaaccaaggactaagcctcggttttttcttcgaggacttggtatctgcaaagaagcaactgcgtgttttgttaggacgagcagttgtttctttttcttttgtcaggcatcaagccttaatccggcaaggctgctttcctcgagcgtctccattgccggattttgtttttgattcttccagctatttcctttaacttagctataggagatagctttgtttttttctccttactattaatcttggggatatagtataggggggtgtcaaatttgtctagggggatagtcgggaaagaagcgggcgaggccgtggcgcgggtaaaagtaccgagtatgtacaggaagcaaaccataaaacgcatgcggcgcgcgcagcgctcccgcgagaagaggaggcggaaccggttgaaggtctggccccgattgccgcagatatggagacggttttccgacttcatgctgataaagcctttggccgccagctcccgcacggcgcgggtgatcgtccgcatggacagcctcagtttttttgcaaggctgcggcggctgaccgcccagctttcctttccacagcagcgcgcgatctccatgtacacggaaaaggtactgtgcgaaaggctgcggacagcttcggattcaacggaaagggcgtgtcctgtatggcaaacatagtagtagctgacaagctggcgctttgttatttctgagaagcgcacggtttcccggacgagctctttttcgcgcagctcacggatcgcgcgggcataggtcgcctcgctgatgccgagggctgcacaggttctcgatttacgccacatgaagatgtcggtctgaaaattgcggttttcctgcatgaacgcgtacaggcgcgcggctcttgcagacaatccggcgttggtgacagcggtcgttgcgatgaacatgtccatgcagtaggctcctttctccgtcatattttaagtttatatgtagttccttctcgtgttgtgtgaatcacttctatatggtcgaaagaccgcaaagcggcggtatggcgcttaactgttcgcaggctcaaacctgtttcttgtacgatttcactctgtgctacggtgagaataccatcgttatttgcctttgatttcataaagtcataaattatttttagatttcgtatgcgcacgccgcgcttcggcgggggaatattcttattagatgtttgcatcgtgaaagtcatctccataggtcagtaagtagttgcagaaaagaaatcttccctttggatgggaaggggttcctgttcattcgagacagaaaacgtgacgccaagctgctgcatgatggaattggcgctgccataccggactttttgatttgtgtccgaaggaataggataataagggtcgtttagctcgattccccatgtggggtatctcggaatattgccgatgaatggattatgataggcacgcatgataagccacttgccgcgcttcaggccgcgaatttcatcgccgtacatgagaggacgtgcaatcatcgttacattcttagaatcgttcggacgggaaaatagtgtgccctgccggctgtttacggaaccgccggcgactgttttagtaccgagcttttttgaaagcgattcagcaaaatccgaaagaggcgatatgccgctgacaaggatgttttggcagcaatcctcgacaatcttgtaagctgcgtttccatatcgtaggagcagctggaattcagattgtatgaaacaggtcatcagaatatttcggcttcgtatggcaccaaaaacgccgtctacgtttgctattttagggtaaattccgaattcgtcagcaaacacgtataaacggcgctctaagcgattttcctttgtggagctattagcatattccatggcctcatttagaagctgagagagcgttagagagaccaatacgtgctttgtggcatcttcttcggggaaaataatgaaagtggcgacttttttctcgcagatatcttcaatggtgatttttgaatcgtgacagagaatctgttctatgtcagaatcgatgaaggcaaggagacggctcattgccgtagacatgacagactgaaaggactgtccggcggcatagctggcggcaccggagaaccaacggattttgtcgttttccggaagtgcatccaaaagcaagtgaaatttgcttttgaatgagggcgatccgtcgccgtccttgtccttttcgccgggtattttgatcggctgcatcagctcgagaagaattttgaaaacggtgacaatatggcgttcttcgggcttgcagtattgagcgacaaggaggcatactgccgtgacggcaccttcagcagcatcataaaaataagcgttttggccttccgaaaatgtttctttcgagtggatgactgagtttgcaacgattttagcgctgcgttccgcatggcttttgtactcttgacgaccggtttctttccaaagatcaatgtacttattggtgatctgcatgttgttgtttgcgttgctgtatttgggatttcggaaatcaatgacattgcatgtatagccgtaatacttttccgcgatgtttttatacatgcggacaacatctcctttgctgtccgtgttgacaaaggaaattccgcaggcaagcgcatattctatctgagccacaagcacaccggttgtttttccgccgccgggtgaggcaatgactaaagtgtgcttatctccggtatctacaagagcggtatgcttggacggattgagggaaacaacaagtcccggttgatttggaagattcttaccctgcctccatagcttcggtgtatatgggatttcgagcaatgtttgcctgagttctcgcttagacgcgaagctggcagttccatgttgtccgtctccgaccttgtgctgtttgattttgttgaggctgaagccatttgagcacaattctatgatcgtcattatcagcagtcctgttccgactatacaaagaaaaatgatcaaggcctttggcatgattctgaaacctccttctgaaccagttcttcattccagtcttttcccaaatagggaataagagaggaaactgtatatcggtttttatatttggacaaaaattttgcgacggcggcttgtcccgggttttccggtttatcggcatcattgtcgaggcaaaaacagatttcccggatattccgatttgtgcgtagaaagtattgtaaaggaataccggacaacccgccaagggaaagatatgcatatctgtgccatggctcatggcgatgcatcgatataaagctcataagatcgattgcagcttcaaaaacatagagccgggttgcaggagttacaggggtgtaattgaaaccgatgcaaaagttccctccttccacgaattttcggaatcttttctgcgagtatgtaccacgaagatgagcagcacgtgctattccctcgtgatcatagcaaacaaaaacgatatttccgttcgtatcctgatagatcagcttgtcgataagaaattcggttataatatcagggctgatttttctggattgattcagataagcaaacagccgcctgtgattttcagccgcaggcgggagaaggaaaaagagtggagggacagaactctgtttcgagacaggttcatcaggattggggggaaggtctgaattgggggtggaactgtaaacgtgtccgccggtcagggccaagacagcatcgggaaaagataaaccaaaaaaattctgaacgaagctgacggctgcaccatgctttcctgtactgttttgataccatttgaagccggttatggtacaactgtcgtgtacatcccaaatcactgtttttcctttacggcgaaggggttcacctcgctttaacagatattctgcgatgtcggcgtgctgcgcatctcgaatctgttcaggagacagagaaatatattttcggctcattttgtacgtcctttctagggagtgttttgaaaggtttgttcatagtcgtgcttttggccgagcttttggcgcatacggttttgcaggcgttgtgttaagctccgggccggtcggtgagattgaatttgattctgtgcattggagtttactgtcatagcgatagaacttagcaatttgacggctgcatttgcaactgcgatttgttgattttgaatttgtgcttgtagtcggaacaggtattcctgtgcattttcggcaccattttgcatagctgtccaataccaaacagcggactgttctgtattccgggctgtacctttaccatattggaacatagtgccgatcagcaattctctttgcgcatcgggttgcagcttttcctgctttaagtatccctgtagtgccatgcggtagtaagaatgactttgaccggcggcaccactgcgaatgagacaagctgctgcgcgataagctgcatatggattctcgatgcttgctatggtgcgatagagcttaaaagcctgcatatggtctacagggacaccaaggccatattcgtgcattcgtgctagccgctgcgtaatgaaagcgtccggcttttcgagctgttgccaagttttggcggcctgccggtacaggcggtgcatttcttctggtttagcagaaatctttcctgtgcggatcatttcggcgatggaataggcggcgcttgcaccttgatcgggatcggagagacaagcacggtagaaatgagcggctcgctcgaagctctgctcgacgccaaggccgtcctgatacatccgtgcgagacgcatgttgatgaaggtgcccggttgctccttctgctgccaagtttctgcggcctgccggtacaggcgatgcatttcttctggtttagcagaaatcttttctgtgcggatcatttcagccagagagtaagccgcgcttgcaccatactctgaatctgcaagacaacttcggtagagctgggaggcacgtccataatcctgaataacaccaagccctcgttcatagagagaggctaggcgtaaggctgtatatgcgtccggggattcgagagcgttccatgcatctgcggccaactggaacagggcttgtgtttcctccggggctcccggacatttcccgctgtgttgaagggaggccagagcgtaggctgcatttgctccgacaatttcattgttgagacatgtccggtagtaggttgcagcagatgccatgtcgatgctgacgccgataccgcgctcgtacattcgcccgagtgcataacggcagaatacgctatctttctctccacggtgataccaagcggcagcctgttcataatccggctcgcctgtaatatctccccggtaatagagcttgccgatatagtagggagacaaacgattttccccggaacgataggcgagcttcaaataggccaacgccttatgaggatctgtaggaacctgtagccgcgagagatcttccggctcaatcccttttatgctttcgatttctatcccggataagtaaatacgtccaagcagatattcgtatctggcaaattgaaatactttgcgctgttccagcgagaaagaggcattcgtatgttcagcttcttcgatgtatggccattgccgggtggcttcttcgaaagaagcgccttgatcgatcaaatcaatcaaggcgttattattgctttcaagaagggctgtctgcatgccaagcttggcctgaagaagatactcattgccgagcggtatatcctgaaaatcgggagcaccgtgcagatatatttgagccagtttgtaggcagcctctgcatgattgccttgatccgccgcaataccataccatgtgacggctgaagcaatatcgcctaagtcgtactgacagtatcttgcgtagcggaattgtgaatccgtatggccgtttctagcttgatcgtgaaggatttgaatctgttccgggcgcattgctgcttttggtttttcggggatatcctgaatctggcggtcagaagtgagggcttcaaaagcggtactatcgcttgagttttcaaaggaaatgtccggaagaggatggatgggtatgagcacttctgaactgtaagatttcatggagccttcgatcggtttattggaatcctgagatacgaattcggcttccggaaagaatactgtggtttgctggggcaatttcatttccagcgcggaacggatcactgcatttttcgcaaaataaaggccactttgctttgtagcggtagaaagcagcgttttatcgggtttggagctgttgttatagaattggtacaactggttttgaagttcgccatattgcgagagaagggcctccatttttgggaacctttcaatttctgaaagaatggcatcaacttgctgcttgatctcaggaggcaggtatttgtagactttccgaccgccgggaagctgctctatcgatgaccggagcgcaagaagctgacttggcagagatgatgcggcgacttccgatgcggagatttgctgtgcggctttagacagtatttccatctcatctttgatttgctgctccaatgtagctttaggctcgtaaatgtgtagaagatcctctgaaaatatttgagagacaaaggactgctttattttttcgaggctgtgttttgtcacgaaatttttggaagtaggattttctgaatagaacatgaaatgcatatgcggatgatgctttgtgttgtgtacagcagcgacccaatgcaagtcgtttatcggaatgccagaatgtaccgaaatatcttcctgcgaatccattacaacttcacgccatgcagactgtgtgttgaagccgagacgatcagcatcatcacgacggagagaaaatacaaagctgtaaatatttcccgtgtgctttgaaaaatcttctttggcctgttcaagatcggtatgctcctgaacagaaaacaaaccgtgaagctgcccatccttttctacaccgggtcgttccgcgatgtagttgagcatgatttttatcgtatctggatcagcggcagattccattgcaacctccaatgcatgggataatacttcgctggcattttctatggtgggggaggaggcataatccttaaattccggggtagtcgcaatttctggaacacgctgcacaaattcagaaatacgttcccgctgtgcacgtgtagcaggtcttgtgtcgccagcatttgcgccattaggccgcaggccaaaggtatagtctgttgcacggtttatgaagcgtgttgcatttgcagcggtttggcacttcaaataagcctgatattcccgtgatttaacaacatcgggcgaagcagctttgaattgttcaatagcagctttttgctttggtgtagcaggaatcatttcatactccggtgttggattccatatgacagtctctctcgttgcaatgtattgaacgagtgctgcggcgctttcaggggaaaaagaatatttgcccaatcgttcgccggttctcgcgatatggaagtatcgggcgtttaataccatacgcgcacccataatctttttgcctccttcatgcgttaaaaagttcttcgttgatcgtatctatcatttcaatgcggccattcgttttctttactgccgcgacagcgcgattgcgaagtttctcatagtccgcattagaaatatggatgtcttcagcgagcaatcgtgttagcatgttcaactcaattgccgttttaaaaatcaatgtggcggtgcggctctgagattgctgtacagatgcgtctactttttttccgaatgtactgcaaagataatccagatcaaattgtccggagagataaccgtgataaaaaagaagggctttgtcgataactaaacttttgtctctgtctggattgagctgctgtagtgctatgatcgaattcagagcagataatccatcttcgcttaggtagacaccgaaacgctttgtttttgccgttgccattttgcacaactcctttctgatagatttttgtagtgacaaacttagtgacaagaaaaatggcttatctatgcgctgtttctggctttctttcagaaatttcgcgagttaagtgacaaagcctattttttagtgacatgtttttttgtccgaaaacccgcatactatgcgggtttgtgaccgggttgtcacgactttagtgacaaccctttatcctgcattcagaaaaagcagacggtacgaagaaattacgattcagaatttagccaaaataccgcatgggaatgcggtgtttgtgcaaaattaccatgaatacggggcggagttattggtgaacccttggttgacatctgttttagaagaaaagttggctgatatatcctgtttttctttaaaggattgggacgtgctttcgacggcatccgagtcggataatggcacattttcttctgaatccggaattcttttttcggatttatgctttttagaatctggcggaagacccgctgaaccggctatggctatatattcctgaacttgtttgggaacaatgcgttggtactttttttcgagaaattttgcaagttccgccttgaaatcaatgtttttttgctcggcatacatctgaagggcatctagcttttgtgcatcgaacacacccgaaattgaaattttctttaccaagattaacacctcattcttcaaaaattttcgcagcggagcggcgaggccgctccgcctgtaatagtaagaaaagaaaaaaagagcctttctactgggcaagtttctgaatctaaaatatgcttttttttaataaaacggtgcgtacttcttttaaaaataaagtatatctactcaaaaaactgcaaaggatcgagccggttttcctgataacggatttcaaaatgcaagtgattgccagtggaatcgcccgtggttcccacgtatccgatcaagtctccggcggaaacatgctgtccgacgacggccgcgcgctgtgtttgatgcgcataaagtgtcgcccagccgtttccatgatcgatttttacaaagtttccgtatgagtcatgccacgtggatagggtcactgtaccgtccgccgcagcgtagatcggcgtcatcgcaggcgctccaatatcgattgcaccatgcgcgttttcatacatgtgcgtatacggattccagcgggcaccggcggtatctgtgatccaatccttgccgtatggagcgggcaaaggccattgaaagtcgccttttccggcaacgacgccggtcgtaatttctttgattcttccgttttccagcaccactttttttgttccgtatgggtgcgttccatcggtcaaataggtaattccgggcagctgcatccagcgtgtccagcctccttcggagagctttgtcttgactacgccgtcgtgatttcccttcgcttcgatcacttcgccgttgccaatatacacgccgatgtggccttccatgcagacggcaaggcccggaatttccggaatggaagcaatatcaccggaaatttctgcgctttccaacatgccgtttgcgccaatatcctgaaaaccatttgacctataacggatcacaccggtgtcttcatcgatccattcgtaggcttttatgagcccgatgcagtcgaaagaaggctttccgctgtacgtttcaaagataaaattcacttcggaatctgtcaaattcgcagacggatcggtgcggaacatcgcctgctgctgacgcaggaaggacatggtaacgtcttggccgtaggctccgtagacgtatccggaaccggcttccagcgcgttcatgcaaaaattgataaggccaatgttggtttttccgtcttcactgtcgagattccgaagaaggattgcgcgatcctcatatccggacggcatttgcgtcgataagcgctcgatctgtgtgcgcatatacgcgtttacggagagcccgaaagtcgcctcgattttatcgaaaatcgcatcggaatccgacagaggggagagcttgtcgtccgtcacaaagcagtcgagaagccgttcgatctggcctttcagcttgtcgttttccgcaaagagcttggcgtatatcgcatacaagagcttgtcgtttatgcgctctccagattcaaaaatcgcattgaactcgttgatctgtgcggagaaaagctccgatacatcgaagccaagatcggtataagtcatcgcgccgcagctgccgagcagcgctgtagagagcagaaaagcagcgatgcagacggcgataaccttctcccacagcttgtgatcggtgagtgtaaccgcaagttttgccgccagtattggactggccatagatcaagcctcctcaataaagaccgcgttttttcagttcttcttttacgatttcatcgatcttcttttccgcccatcgcatcaactttttggttgtatagatcgtgaacggtaaagagacagcgacggaagtaacgatgacggccagtattcggcctacaaattctgattctggcattgagcatcctcttttgttttcatcgcgttctgcaagcgcacaggtatgcttcaatggcttccggacagctcaaaaaaccgccggatgcggtgccggagaagccgccgaatacggttacgcagctctggcattccaaaaaccagcgtccggtgcgctgcacagcctccatcggttcaccgcacacccggcaccgcagcccgcgttcaacttgccggtacgctccccgctgatcgaataaaataactttcatttttcttttttcctcgctttcatcaggttctaccattaaaaaagcggaagtgcttccgcttttacgcgcctccggcggtgccaaagagtgcggctttgtatgcgggcgcacgcacgtgcaggtggtagcgctcgttgccacacttatagaggcaatgcccacgatttggtatgcgaataagatcgtattcccacggctgtacattgagtgcgcgctgaaattctccgggattgcagttgatgcccggatggaacaaaaagctgtgcgtgggaagcagcatcagcggctttgtatacgtgatgaccgtcgggcgcagaaggtcttcaacattttgcgacccgatacagacgcccgagtttttcttgcggccgcgcttcataaagctggtgatataggaaatagcgagcctgttttcgacgaactcgtgcaactcatccacaaaaaggttgcagtcgccttctgtcaggaatttatggctcatgtaggagaaggcgttcataaacatggcgttcttgaggttctcgttggtattcaaggcttccttaacgctgaaatcgatcaaatccgcatcggggatattggtatgcccgttaaagtagcgggaggccgcgccgatgcagatgctgcgcaggccaagcccgacagccttgagttgctctaggctgtacatgatagggtggttgtgctttttggcatcctcgacctcctcctcgtagttctccaccttctgctcgatcacccggtacagatcgctcaagatggggtagtccttcgaggagagccgcgagaaattgctgtctttatcgatcccgcgccggtgatacgtctcggtaagcatgatttcgataatatccagttccttttccgtgaagccgcggtacatgaagaaaaagtcgcgcagataagcgatgtgctgggaaagcgtgttgctctctttgaatgcggcgggttcatctgtatctccgggaccgtcgtattcatcgacgggatcggtcagccgcctcggctccagcacattgatctgatattcaccgctcattgtgttgagataggtgccgccgagattttgcacgaggtcgccgtactcatcgtcaggatcgaggatataagcctttttaccggcctcaacggtatttacgatgatgcttttcatcaagtaagacttgccttcgccggagttgccgaggatcaggatatggccggttgtcttatcctgcgtgcgccggtcgaaatccacgacaatgttgctgccgttttgatcgcggccaatatagaagccgtgcgggtcagccttgccggagtaagaaaaggggtagaggttggcgacgctgcttgagggatagacgcgctcaaactctgtgccaaagcaattctttccgtttggcttgatggtattgtaggctttgagctggcgtaggtgcagcttatcgacaaggattttatgacgggacaggaagctgcgtacttccatttgcttagataccaactgcttgagatcgtttgcgatcagctcgataaaaacggcgcagtaaacaaatctttcctttgtccgctgcgtttcccggatcacacgggagagcacagacatttgctcgtccgcctgaatctgctcgtgcagtttccatgcattgtttttctgcatggttgtccggttctgcgcccggttgaaaatatcgtttcgctctatgtccggcaagtgccttgtgtacatgtgaagcgttacgccgtccatttcgccgagctcatgcagtacggcaatatctgcggaatctttctgaacagtttccgcgtaggagcggatcgcccatacacagcggtatgtattgccgagcagataatattccggtgatttgcggaaggaaataatgcccggtgtaatcagttccttgtaggtcttgactcgatatgcttccatttcctccggcgtctgcggcgtatggggctttcggttaagcaaaatcatcgtattcctcctctcttgcgtactgctggccgtctttctccgggatactatcgctgtaaatgtcgccgacatagtagatggagaaaagccgttttaatgtttccttatctgcaatgtgtacggaataatgctgttcacgaatgagctgtacggcctgcatcgtgccatgtctggcttcctcgaattgaccggcggggaagttcagcagaaacatgaattcgcggcttgtactcatgctgatattgatttcgtccatgtgctcgatttccttcaggcagagacgggagatgattggatttcttgcggatttggcaagctggcggtaataccgcttgttgttttcgtagctctgtgtagaagaaacgcagaggatctgcatgtccggaaggttctcgatcacgttctgaaggcttcggatttttgaaagaatttcgccccggccaagcaccgaaatgttatccgggcggagcatgagatagacgtacaggcgtccatcgtcactttcaatcgcatgggcgtcgtcattcatgtgcagcgggacaaactgtttgatgtttaagagctgctgcgcgtgcagagtggtttttttaggctttttctgttgcttttgtgtcattggctggtctccttattagaatgggctccggctcattccatgtgtattcgagctgatctacgaataaaaagttcacataatcccatatgtaatctgcgattgcccgttcaccgcccattgcggtaagaatcatgtagattaatgtgagaagtaacgggaaccacgcaaaggttaaaaagaagataaagcaggaaaggacgagggatgcagcgatgatcgtgagattcacacccgtccaaaagatgaatacagctttcttcttcaagtcctcggggtaaaagaaatagttttgatcgtcgttcaaagggaaagcctccttcctcagtgtgcgaattgtcttaccagcgtgaatacggacgacgtggtgtgtacgacggagccgatgttgccgcgcgttgaggtatccattccaaacatttgcgcaatacgcgggacttcagccgcaacaagcatcaggccgagtccaaaatataggctggttgtttcagcatcttgcagcataattagtgcaagaagataaagaagattctgcatgaaagctgtaaagcagatagcagccacctgcctgcaccatgcgctgaaaccgtcggtatagccgcgcgcaagaggaagcatgtgcagggagccgacacaaatctgtataagcagaatcccgccgcgcttcaggttgccgaaaaagattttgaagatcgcccacacgattacgacaagctgaatgagcgcccaccagttggcgtttgtgttgaaggctgcgtcggttacgtcggtcatttggaagccgtcttgcagctgcttcagaaacgaccatatgccgccggtaagctgtgtggaggggagagagccgtacacggactgaaacatgctgtcgatcgcgcccttggcgagatcggagatagaggcgctggaaccggacatggagccgacggcggcagcgcgaaccgagccgtaaatatccatcgaaaactgaaagagcagaaccgggatggaggaaaaggtgaggagcgcaataaacagccgcagcatattcataccggtgcctagaaagctgccgcctccgccggaacgataagtaacggcgaattccatcatggcgataaaggccccgatcaagccaagcccccatgcaagcatagagaaaaagttgataatcgctgatatgacgctgttgctgaaaagatcgacggtatatccgttgacttcatcgagcatggttgtcgccagcgagacgacctgatagtagacgtaatgatagatttcctctagtgaggagcttgcaaacacgaagaatcaccgtcctttcaaggttctgccgttaccatccgatgatactccacatccacagcttggctgagatggagatgacaaggcaaattaggattgtaagcaggctgccccagcgcaactccctgtcattgcgatagtcgttccaaatgaaaagtccgcgtacaatcagcgcaataagaagcacagcggaaattacataaagggcaatatttgtgacgcccattacttcaggtttcacataggtgttgaatacgttttccagtgcacccgaaatggatgcgtcaaatgccgaaaaattaaatttgatcatttactttactccttttgaatttgtttagctgaccgtgacggaacagcttgcagataaaccgcttggtgtcgagattgtcacggtggtggctccggccgcaagtcccgtaatggtgacgccggaggtgttcgaatctgtgagctgcacgatactgctgtcaccggatgtccacgtgacttcctgttcgtagagagcggccggtgcggccgcaatgttgattcgccaagtgtcgccgacttgaatgctgatactggcggcatccaaagtaatggcttcggcatccggaacaggcgtgggctccggcggtgtctctacgacctccgggcgtggtgtgggcgttgcgcctgctggatcgggcgtcggttcgggtgtgacttccggcgtcggctccggggtaggttccggagttggtgttggggtaggttctggcgtcggtgtttcctcgcgcagaacaatcgtgacaggggttggctccggagagggggcgggtgtggcttcgtcctcgaatagaacggccagaggtgaacgcccgctcctgttgacctctacgacctgccaaaccgtaccgccgacgacaaacagcatgatagccgcgccgataagcagaattttcatgtttctgttcatggcttcatcctttctttctgaatgttttgcagggaatgcctgccggggttgtgaccggcaacctgcattacaaaagagctgcccgaaatttcggacagctctttttcactctgcatggcaaaaagcggaactacttccgatttttcctggcttttataacgatcagcggtatgccgatgatgcctgcggtgacaattacgcctgcgataatcccctgcaggtatttttctgtccacgtggacactctctccgacggctcagtttcatccgcactgacctgctcggccgctgggggatcgatccgatggccgcgtacaagaagccggtgcgtgttgacgccatacggtgtgcaggtcagtagggtaacgtagtctgcaccctccatgatctgtacggcatccgtatccgacggcagcgtcacgatgatctggtcaacttcgtagtacagagcctcgccgagcacgtggatgcaaaactggtcgcctaccacaagctgatccagatcagtaaaaagccgagcagagggcaagcctgcatgcgcagagagaaccgcgtgcgtgctcgcgccgcctgttggcaaagaggtgccgggcatatgcccgacacccttttgcagcacgtcttcgccgacgccgtgatagattggcagctctgcatcgatcgccggtatttccagcgtagccatgacgccgtttccagcaaagttgagaagctcatcataggcgcgcagttttacctcgtctgtggcctgtacgctcaacagggcctcgttgtagagctgcgcagccttcagctcctcctcgatctctgcattttccatggagctgatctcatcggtatactgtgcctgcacagcggactgctctccgctcacgaagtagttgctgagtatcggatacaggatcagtccgagcccgacaagcaggagcagcacaagagctgcgcctgcgaggacttttttacatcgcgtttttatcacctccatctgtgcagcttaagaacatcagcatgtaatcagttcgtattttgcttccccgtgcagcgcccggatgcggctctctttttccgtatccgatattggcacatcaagaattggggcggtttcttcagcgcgtacaccacgcataaactgcgtgagcaaggtctcagaataaaaagagcagcgcggatcttccaactgcataagctgggcttcatcgacttccacaagcagacccatcaaaatgacgaacagctgctttgtgttgtacccggaattaaaatatttcccgatcatcccatccgtcatttttttcgataacgccacgtcaatggcctgtgctccaattttctgggaataaactgcgtagctgtccgaccgaaactcgtattgcctgccgtttcgtgagcagaagccgatatgtctgtcacgaaatctttcaaattcgtgtgcaaagtatgcagattccagatacatttccagtattgaccggtagtttacgagcctgtgcgtctctgaaaacatgaaaattctccttcccaggcaagagtagtattcaatattcaaactgcgtatagagagggaactccaacaagtttttatagatattcctgtcgtcatcgatgaaattgtcttccggggtacgtctggctttgatatgtaccgtttttcgcctgccattagagtaactgtgtgagacaagcgtatagatttcatcgcccgacagcttcccgatctgcgagagcttattttcctgagatacaggcattttgaggatcggagctgttttgtctgccgatacaccgcagataaactgtacgagaagcgcctgcgaacaggattcgtggcttttatcttcaatctgcgcgatctgttcgctgtccaaatccatgaggtgagcgaccatgatccggaacaggtgcctagtgtcatagttggtattgaaatatttctctatttgctcatcggacattttcagcgacagaatgtagtgcgcattccgtttgtttatacccttcctcagaaatgcaacatagacttcagacatgaagtcaaactttgtcctgcgcctgtcgtttttctcgcataagccaatatcgtccatgaagaagttttcccaatcatagtcgaaatacgtcgattccatgtagtaatcgaatattgagcgatagaatgtgtgtggtaacatgattttctcctttccgccggaggggatcggcgattttgctggcctccgtcattctgcgcacgaaaccggaacccagttccggttttttacgtaattactccttgttgattttgtcttttttagattcatttttctcatgtgaaagtctctgggtaatctttgcagctccaattcgataccattctcttgtgtagatgaaaactaggcagtataccagaacaactaaaaagacttttatttcctgctgggatgggagtttgaatatcccgtaaaaaacaaagggatcttccaaatcaaaaacgctcctttactgttatagataagcaagctattcagcttttttgttgcattctcttgtttgggcgattttccttttcttccgaaaagggtacagaatatcttttgtctctgcacaaacaccccaaactaccactacaagccatatcaagcccaggattaaaacatatagaagatcatccatgaatttaattacctccaaactaaaaatcattgtagcctttcaccggggttgtgaccggcgatcccgcattacaaggaaccggcggagcaatccgccggttcctctcactctgcgcgcaaaaccggaacccggttccggttttcacaatccatcggagggaaattgcgcccggttttgccggttccgctccgtctcatacgcatattacttctcgtcggcctgctttctgcggctcttgacgtaaagcaggataccgcccgctgcaagcgagacgagcatcacgccgcctgccgcatacagccacgtgccccgatcgccggttttcggcatctccggcccgcgcacgttcgtcaccttgaacggcacgatcgccgaaacggagccgttgtcctcggtcatggcaaccggatcgccgttgaccgttgccgaggctgtaaggcccggcttgccgcacacagcgcaaatcacgttgttctctgccgtcgtgatctttaccgtgatcgggtctttcagaagcaaatacttgtcgtccgtcgcgatctccgtcagtacgtactcgtcatcctcaagacccttgacaataatcttctgcgtaccctcaaccggcacaaacgtcgtggcgtccgcctccgcatccacgtgatccgtgacgtagtagacgccctccgcttcgttcagagcggcctgcacccagtatttgtccgtctcattccaaatcttgaactggacgtttgctgcattgcccttgccgtcgttgaattccttgagcagatcgaggccgtaggcgtagaagtggcagtcgtcctcgagcgtatcgtagtagtccatgtttgtgcgccgccactcgagcgtgacggcgttcggattgccatcgtctccgtagaccatatcggcggacgagttgaccgttgccgtgtaggtgatccgcatcgtgcagtcgctgtagccgcggtaaaggctcgtgctgagatcatacacggcattgctgttgttgatctcatcgaggccggattcggtcattgtgacggtcatcgtcgtggcgtcattgtcggctgtgccgtaggcgacattaaacttgccgtccgcctctgtccactcggtgatcttgtgcttgcaggctgaatccatgtaccattcgattctcacatcctgcttgttgtactcgatgcccttcgagagcgtgtccacataggtgtaggtcgtgagcgccgtcgcatccgaggtgatcgtcggcagcgtggaaagaatctggtagtctacaacgtcgccgtccgagccggtgccggtgtgggcatagccgtccgcgatgtcgtccgtggtgccgttatgcttgccggtgtcggcctgcgcctcgcgcagcgtcttttcgagcgttggcatgccggtctcgttcttcggatagattacaacgtcataattccagttgtcgccgtcgttcgtcgttgtcggcagggagacgaggaacggcgctgtcgtggaagtgacgttctccggcacgtaggtctcaacgacgacgtagaggccctgtgcaagatcggaaacggaggaatggccgtaggcgtccgtctccggcatgtcgatgccgccgttgctgtggacataggcttccagcgcgtttttcgtctggctctcgatggagccgagctgaccggcaaggccgtcgatcagcgtgtcgctcataaactgcaattcgttgtgatcgatgcggtaggcgtcgtcacggctcaagccgagcgctgcaaggaactgctcagagctgctggtatccggcagggcatacagcaccatatccttatagccggtcgtctcctgctccgagtaggtcatgatgtccgccaccttggcgtaggtgtagatgacgccctgcagggcatacggcgcaagcgcttcttccaccgcgctgtcgtgctggccggtggatacaaacgtcgaatccgtcaacacgccgtcctcgttggccgtcgtgaaatcgtacttgtagagctcgagggacgccgcgcgatccgggtcgatcgtcgcctccgttacggatgcggccgaagccgtcaccgcactaaagcacattgcgacggccaacacaaccgcgccgagccgcgaaagaaccttcattttcttcatgatcttcttacccttctgtgtgtagatgaaaaatcccgagcagaacgcagccgcgatcaggaggatgccgaccgtctggaacgggaagcctccgccgccagcgcccggcagctcgaagttgcggccgttgactgcggtaattgtgatgtcggccaccttctcgccgtcaatctgtgccgggaggctgccttcaaagagaatgtcgccgagcaacaccgtgccgtcctgtgtggaaacctctgtgaggcggtaaaggatcgttacggtctggttatcgacctgcaagccggtaaaggccgcaatgccgtcctcgccggtcgtgaggacgccgttttcaagaccggggctgtcgcacccgccgatggatactgtgctgtccgcctcgcgggccgtgacgaaatcccatgtcacgccgtcgtcagtcgagaattggagggcaaaggagacgccggacatcggggtgccgctggtatccaccttggtgactgtgatcgagccgacgctcggcgtgttctcacgggtcacggtgataacctgcccgtcgtgctctacggcggcttcatagattgtttcgtcgaggtcgtagccctccggggcggtctgctcctgatagtagaacttgccgtacaggatgttttcgaccgtgatctttccgtctttgtcggtcgtcgcagtcgtaatctctgtgccgtcctcgtaccagaagcgatacaccgcgccctcaagaggtgtcacgccgtcatgatcgaccttgagcaactggatgctgccccgggcgatccagttttcgacgtccaccgtcacgaccgcatgctccgtgagcgtcacagtctgcggttcgggctgtttgtacttatccccgacgttgatctccgtcacggtgtagcggatgggctgcttgcctgcgatgtcggcatacacgggaagattctctgcgacggctctgccgtcagcgccggtcgtgacaaccagcgaccagtcgtcgatgtcgcgggtgatctcaaagtcccagccctcgatgatcccatcttcggacgctttcaaaatctcgaggccgccgagcttgagggaattggtgatcgaaacgccgtaggtcgcatgcgcagacttgtcctcggtgatcgtcacctcctgatccggtgcgagctcgcggccgtcgcagccagccgtctggtgcagcacatacgtgccgaagggcaagtccttcgtgaccgcgtagccggaggcatttgttgtgatgcggtcgcgctcggccgtgtcggcgttggcatagctgcctgcggacttgaggtagacctcaaagactgcgccctcctcgggcacgtcgtcgccgttcaccatgtcggcgtacttcgtgatgctgatcttattcagcttcacctgctcgtgcacggagacggcgacctgattatgctcgagggtgaatttgccgggcgccgcgccgaccgggtagcgtgtgccgtcgagctgatagccgggcgagggcgcgatttccttgatgtaccagctatcgccgcaaacgtattccttggttgtaaactgcccgttcgcgtcggtcgtgtactgatcgatcaggtcatttcctcgatacacaccgtagaccgcgcccgcaagcgaggcgtcgccctgcgcagtaccggtcgagctgtcgcgcttcgtgatcgtggccgtccactttttgaggacgttcgcaaaggaaacagtcgcggtctgattggccttgatcgtaaccgtctgcgactgcggctgcacgtattggtcggaggtgagctccgtcacggtcagcacagtgccgtcctgcaaattcgggatggtgatggtgccgtccgagccggtctgcaccgtggtgttcacgccgtcccctgtgacgttgaagcgcacaccggataccacaccgtcctccgaggtcttgacgatcttcaaggagccgttcatttcgacgttgacattgagcgttatgtaggcagggtctctactagcaaagccacaagtgacaacatcttgttcaacttcatgctcatagtaatagccgggttcatccctatagtagtcgagtgctacatcataaacaaatcggacaacgcccgttgcgttaggattaccattagccgtaagcgtaacagtatttccggactttgctaccgttatgccagtggtatttaaagcaggggcgtctttataatttgtcaaagcgcctgttgtatcggttaaagtaactgtttcgccgactttcattgttacagtctgaccggaaatgctgggcgttgtataaaactggtctactttcgcgagaacagcctttttgaaggtgttataggtagactgagaggcgatgttatccatgccgcctacggtgctgggaatcgagacgctggatgcaccgacgaagctgccgccaaagctgttgatggtttcccagataaggagctgcgtgtaaaactctgccatatactctgcggatacgtcaatcgtatcccagttgtagtttacggcgctgcaccctttgacattggcaacatttttatagcggccccagtagtcgatgagagtcaatcgatcctgttgttcttttgtcaaatcctgctgcgtatagccgttgttatcgcctaatcccagcgcgataccatgctctacacagtaggcaacatttccattaacacgcttgccgccccagccatttgtagccccttctacatcggtgacatagccgatgttcattatataggtcgagcgggattcggtaacggtaacattgttcgcatagaaaacggggagattcagcccggcttcttcggcgatctcagcgagcgtcttatcgatggcctcgcggccgtcgatcgtgcgaagctggccgtcctcgccgatatagccgccgtactgctcgaggagctcctcaaatttcttctcggcgtctgtgctgtcctcggcgatatacgccatgggatcgatcttgctgccgtttgagcgcacctcgaagtgcaggtgcgggccgcttgagttgccggtgctgccgacgcggccgatctgctgtccgcgcacgaccgtatcaccctgccggacattgatttccgagaggtgtgcgtagagcgtcacggtgccgtccgcgtgcgtgacctgcaccatgttgccgtaggaattgctgtctccctttgtcacgatgccgttccacgtctgcgtgacggtgactgtgccgtcgtccgtggcgacgaccggtgtgccggtatctgcggcaatgtcaagcgccgcatgctggtcgccgcagccctgcgtaactgtgaaattatccggcacaggccaagcgtgcgcgccgccgatctcggactcgatcacggtgaagcccggcacatagggatcttcgacaggaacagcctccggtgtagccgtgggcactgttgtcggggctgctgtaggcgcggagctcggctctgcctctacctccggggcaggtttctccgtgggcgttaccgtcggcgcggcggtcgggacggaactcggttccggttccgtctctggagcaggttcctctgtgggtgctgccgttggctcggccgtaggggcggaactcggttccgaatccggaacaggttcctccgtgggagccaccgacggaacagccgttggagcggaactcggttccggttctgtctccgggacgggttctgccgttggcgctgtttccgaagtggcatccaccgaagccgtcaccgccggtgcaacctcgtctgcgaaggccgttaccggcagcgctgtaaagagcatcaatgctgatagcagccacgcaagcggtttcttcattcgtttcatttccattgtcctttccgaaaaaatatctatatgaagaaagccgcactacatcgtagagcggcctcgattgcatgaaaaaagaggatcgacaaaaatcaatcctctttttgtgtggtattcagttttccagagcaaatgtatttttaggtgttcagagcctctatcagggatgaggtatcagtcatcccgtctgcgttatcaataccattcgacagtgtattttgtacttccatcagaataatatacatctaggatgtaatagccattgacataactgccatccggtaatgtttttcctcctccaacagactcagcatacaccgcagcatcgtaagagctatcaaacaaaccgtcgctgatatacccaccagtgatgtacggttcctccggtacaggctccggcgttggttccggggtaggagcgggcgtgggggccggtgtcggcgcaggcgtcggggccggtgtcggcttcgcagtgggtttcgccgtaggctttgctgtcgcagcgggcttctcggtcggttttactgtggtgctgccgccagaactgctgccggaggagggcttctccgtcggttttgcggtgggctttgcagtcggcttggatgaagaaccgccggtgctcggcttagacgagcttccgctcgacggcttttctgtagcggtaggcttcttcgtagccgtcgaggacggcttggagctgctgccctcatcgtctttcttgttgttgtcagatttactcgattcgctcttgctggattccgtcttgccgttgtccttatccttgctggacgctttcggagaggccgacggctttgccgaggggctggccttgtccttatccttttcatccgctttagggcttgcggacggcttagccgatgcgctggccgacggcgaggccgacggttcgctttcagtcgatgcagccgagccgcaggctaccattccgccgacaagcagcgccgtcgcgacgatcacaccggccgcaaggccgatgatctgctttttcttcttacttaggctgttgaatttttctttcattggttcttcctcctgatagttaaaatatattccaaaatttggtttgtgtcaagaaaaaggattattggggtgctgtttcgtctgcaaaatgtgcatctcggaaaataaatctaatagattgacaatgcaatgcaaaaatcgcataatataagtgcagtaaacttgaaagaggatgatgttatggcaaacacaacaaatttcagcgttcgtatggacagcaatattaaaaagcagtgtgaagctctttacagtgaattgggaataaaccttaccacggccatcaatgtatttttacgtcaatctcttcgcgccggtggctttccctttgaggtgaggctggaacagcccaacaaggagactgttgctgccatgcttgaagcagagcgaatcgcccatgatcccagtgtgaaacactactccgatgtggaagaagccctccgggagttgaaacgatgaaccgcgatattgtttggacgagcaagttcaaaaaagactacaagctggcgatcaaacgccgtatggacatcaacctgctagatgacatcatccgggcgctggcaaaaggtgaaaattggctggcgactgggtgggtcgccgggagtgtcacatccagcccgactggctgctcatctatcgcatcgagaatgatgtgttggtgttaacgctggcccgcacgggaacttatagtgatttgtttgacaaatgagaaaaccgccgtatgggaactcctacacggcggttttcttctcttttgctgtgctacatgaaagattcggagcccgaacctgtcctgtaacaagcctgactctcggaaatctcttgtgttttacatttttttgatattctgttcttaatcttctagcaacgatactacgcactccacacgatatttttttgaagcgggccatctaaaatcccttctctgttttcctcatacacactcctctacaatattgccagataactgtccagcctttcattcacgtaccctgcaaatagcttttccatcgctcccagattatgtttttcatgatactcgtcaaaagcattgtaatacgcaatcctatctgcaaacttaatattaatcggcggatatccttccttcatcaattccagattcacaagcagtcgtcccgtgcggccattgccatcgatgaaaggatgaatcgcttcaaattcgatatgaaatcgcgcgagtcgggaaatcatatgctctgtgctgtttctataatcctccagcagcagttccattttgggttgaattagataaggctgcacaggttcatgctttgcacccataattcttaccggaactcttctataaactcctctgtcatcctttttatctgccaacaccagataatgaatctgtttaataatactctccgataacggtaactgatcctttaccaagtctcgcacaaaatcaaaggcttccttatgtccgaccgcctccatgtgatctttcaagggcttctgatcaatcgtcaatccacgcagtaccatgtctgtctcgcgcaaagtcagcgtgtttccctcgattgcattggaattataagtgtattcaaccacaaactgctctgtcagccgctctacctcaccttccgttaaaggacgtttggcatccagttctgtcttcatcctgtcaatactctcaagcaggctttcggaagatttataccgtccgtcctccggttttttcgtctctgccggaatccgatagctgcgaccctcacggattacgcctagaattttcccttctgagcataatatccgtactcgcctatctgaaattccccatttctctgcggcctgttttaccgacatatacatagttttgcacctcactttcaataatagcattataccctattaacggaataatagcaacgctatcggaataatattttttgtttatcggaacaatgcaaaaggttcggcatctgtgtttctcactcccaaactgctattttatattcatcatcttccgttacagcctcaaattcctcgcgggtaatcaggcgcactttttccggcgggactttcaagaactcggcaatgcccctgcgggattcctccaccatctctgtaagcctcgattgatcggccaaatatgagaaatcccggatatgatcgttgacgacagatgtatacccgatattgcccgggctgtggaatatcgccgcatcccaaacctcgaaatagagtgttagtcttacgtcgatcttgcttattatttcttgagtagtacgatcacacatgatttacagtatctccaatcattttgctgtatactcacagtgtaaaaagcctgctccggcatcaggctggagcaggcttttctacgggctgagagaccgctttagcggtctttctaagttggttgttggttcaaagcattaaagattcctgagttcatctctcaatttacatatatcctctgaaatgttttgttgatgtcctaaagcagtcaaataaagttctttaattatccgacgaaaattagtctgcatatttcttcgttcagcttgttgatgtgcgctggaaacagaaacactattctgctgtgtgctgattttctctaatacgttgttttctagacgaaacgatgtcttcagcatagaggattgagtgagtaggagatgacggtctttgctttgcaagtcattttctatcttattgactttttcttttatcgataaaagatgcgccattgtcttatcagcttgccacttgcgtagataaaattgtatacctaagaaagccatcaagcacgtgagggcgatccatgaaaatgtacgaagatgctctttcgctgcgttttgtaggtaattgaaaaaatctttaccagcgtctgtgcttgcaagtgaagctaaaccagtgggaatggcaaggagaagcagtgcaagggcaaataagatatacgaaatatttttaagtacgcgttgaaatctatataaagaatttgatgacggattgtctttggaattcatattttataactccatttcgtgctccaaatttctacgtgagatcacatgatttagattatgttcatgctgaagatgtaagtcttccaattctatacgatgtaatgcattttcaagttcaactgtgtgttgggagatacaggtattgatttcctgaatacgtagaattgcagcttgcatctctgcttttaaatcattttctttttcttcagtaggatttactgtatactcagacagaaagtgtatatgttcagagagcagtccgtacaaaacggtgatctggcgtgtgtttttgataagagtttgggtgtcttgttctaggcaagatagttttttagttactttatttaataattctgaatattgtgattcaacagatttgatagcgttttgatagttttcatccagattatcactttttgcggaaagctcctgaagtcgctcttcaatttcgttgctttctatattgattttgttttgttgaccaagaaaagaaaaaaatttattaagcactatgaccactcctgcacagaatataacacagagtataagaacaactaaaagagcatcaacagtagccgaaatatcgtttgtcattttattacctcgattatacattgttttttgtaataattcaatctttttggatcaattttgttttttggttgtggtttgaaagcggcaatgttgccgcttttcaaaccatctgcatttccatccccatttctggtttaagggtgattgcctgcacctgtttaggttgttggaggggaatcctgttcattatgggcataatgtttgacagagacagttccgcattcatgcgttcaagatgcacggagtatttttcagtaaccggagtgaggagtttatcgatctcgatattcgcatctgctgaaatgagggaacggtagcaatttgcaagatgtgattttcgggcatccgtaattttgatgtcatatgtattggcaaacatgatggagagactgtctgcttcaaattcatgctgcatagtggatttggaatcatccggtttgtgctgcatcagaccatgtgacatctcatgcagtaaagtagatagcttttgcgtatctccgagcagttcattgatggtgatttcgtgtgagtgcatgttgtaggttccaaaagttgctacaccgcgaaagtcgtcttcaacaacgggcatgccgatcttttccgaataccggcaaaagacttcgtatatttcccggtgctgtaggctgttatacccgaggccgcagattttcggatagtcctctatagggcagtctgtttgacttatatcgaaaacagttccctgtttgtagtggggaatttctcgcgttggcaacattccaatctcaatttgatgcttttgttcgggggaagcatattttagcggctgccatgtggtatttgctgaattgggaaggaaataggtgactggcgcataaacagaaattgagattccatgctcgttttttcggacgtggtatcccatcgattcccatgttttataagcggcaggaaaaagtgtgtttgggttcgccttatagatgagcatagtgtttcgtgcgctgtatgtatgcaggcgagagctaaaggccagatattcagcgatgttttcgggagattctttccagttgacagctaagtccttaatctgttgggtagcttctgcctgcttttgcgcacgataacgctcccgttcctcatatgaatagaattgccgcatttatatgtccccctccaatccatcgaaaagcagggaatctataagagcatcaggcatgctcttatagatagatatgtagcgttcggctatctcagagggaagttcgctgaacggatgtgcgtaacgacgttctgtaacctcaccgggtacagcgaattcttcgggaatctctgtgtaccaaagatttccttcatcatcgatacaaacagcggtagtgttttctgcaaaaagaatggttaagtattcagacgaaaacataatgaatcaacctccttggcttttagggtgtttggaatatcgtctgttaaaagtgtccagtattgctgtttcaatttccatgcgggcagaacgtgtgcaaggggtgaaagcaaagatacctgcatgtccagaacggggggcgtcaggcgctttagtgctcaccaaagggaaacgaacgtatagccggttggcgctttgaaggatcagtattccgtttatggcatagccatcttctgtaatgagattcgcaatcgctttgacgtgatgatccggaaggcaaactggatgtacgaaaatgcgtttaaatttcattccaagtacctccggaaataatgctggatgaagcgtttggaggattcttcaggaatctcatttaaaagattcagaatgtgaaggacagcgcgctttaattcgtcctcatgctcatggcttccaaaagcggcaatgttgccggttttctccggcgtatccttggaagcgtccaacggaggcggcgtgcccggttcaaaagcggcaatgttgccggttttctccggcgtatcctcggaagcgtccaacggaggcggcgtgcccggttcaaaagcggcaatgttgccggttttctccggcgtatcctcggaagcgtccaacagaggcggcgtgtccagttcaaaagcggcaatgttgccggttttctccgacgtatccttgaaagtacccagtggagacggcgtgtccggtctaaaagcggcaatgttgccgtttttttcatttcgcccgactgcgatacggcgcgctgtttttatgtctaagcatccatcggctatttgagttttttccctgtccgttagtttttcggacatttgcttatagtaacgaatagagcgctcggagacccccaataacgtagcgagctgtttttgcattccgcccttgaattctccggcagctttcatacgggacaagagatcgatgtattcttcgtaaagctgtagctttctttgaggtgtatattctctggcagcatttgcctgatgcagcatgaattcagcgcgcagaggggaaaccccttcaaagacataacaggaaacgctgggccagtggagatattgcgttattgctcgaaagcgtctttcgccggaaaacagagtatatcgattcccgttttttatgacaccgagaggcgttaaaagacccgcagattcaatacttgcagcgagactgagataagcgtcctcgttatcatctgtagcataattgtttttaggagcgaggtcgattagcgttacatcaatcgtttcgttatagccagcctttgagttactgtctgttgctgtgctgagatcgtttaatccagatgttattccctgaaaatttagcttcttcattccgcgatcctcccaagcaattcgtcggcaaaagcctgataatcgagatttccattgctgcgtttgtcgaaaacacaaataggctcccgcgcattgatggcgcgaaccagtgtgatattacgccggatcgttgagcggaaaatcggaaatatagtttgttcttgaagaattgagcggtaatcgctgcgtaggccgcgcttctcatccatcgtgattaagcctccgagcatttgcagtctggggttgatccagcgtcgtatgtttgcaatcgtagaaactttcgcgctcaaagtttgaattccgtagtcttcagcgagcatggggataataacggcatccgcatagtagtgtatggtgtccataagcgagcagttttgcggcgggcaatcgatgatgataaaatcataatctttcaaaggggcaaggtgatcgctgaagacagaaacatagctgtcgtgattcttctttcgggaagcaagcgtaagatcaaactctgtgaggtctgcacttgatggaagaacgtctacgccaaatcttgtactgcgtatggcgtctgtacaaaggctcgtccctttcagtacgtcggcaagtgtaggggacggacaatgatacaagtcaaaattagcgcttgcagagctttgcgggtctgcatcgatcagtagcgttttgtatccgcgttcagagagaatagcagaaaggtttacagctgtcatagttttgccgacgccccccttctcgttggtgatggcaattcttttgatgtgtttcatagatgaaacctccttaaatctctcgcttggggcgaggaaaattaaaaaccggcaatgttgccggtttttgtgtacttgaagatggatatagtgctagagaaaatgggcacctgccttacaagcagggggtcataggttcgagtcctattgtccccaccaaaatgtggcccggtagttcagctggttagaacgctagcctgtcacgctagaggtcgacggttcgagcccgttccgggtcgccacatttgcctctgtagctcagttggtagagcaggggactgaaaatccccgtgtcattggttcgattccgatcggaggcaccaatatgcggacgtagctcatctggtagagcgccaccttgccaaggtggaggtagcgagttcgagcctcgtcgtccgctccaaaaagaaaaaggcgcccctagagcgcctttttcaaaatctggtgacatagccaagtggtaaggcgtgggtctgcaaaaccctgattccccggttcaaatccgggtgtcacctccaagcgaaaggacatcgtaagatgtccttttttgctgctgtgcgcgcaaaaacactgcatattcggatgtgaaacgtgccgcggtcctttggcttcgatggccttcaaacagcttcccgcggcagagcgcgcgcaaaggcacagccgcttgcagcggagattctccgcatcggccgccttcgtccgaataaaaccgaaaaaatgatagagctgaaaaagcgcggggccctccttctgcggaggagccccgcgctttttcgtgcacgaatttgttgtttgaccgccgcaccgggctgtaagctgcgcacggtggacgggggagatgtacggtgctgttgggtacggcgtagaggtgcgaaagccacgtccatttcgggcgggtggggaacggcggtgtacggccccgcactcccggtatattcgggcataacggtcccgcgccgtacgggatacaccggttattccacatacagcccgcgcagcagttcgatttcggccttgtagccgggcagttcgttcggcgtttcgaggtaaaagggcaggctgcgcagagccgggtggttgatgatgcgcgtgaaggcttcaaggccgatctttccctcaccgatcttggcgtggcggtccttgtggctggaaaggccgaatacactgtcgttgatgtggacggctttcagacggtgcaggccgatcgtgcggtcaaaatctgcgagcacgccgtcgaggttgttcacgatgtcgtagcccgcgtcaaagacatggcaggtgtcaaggcagacgcccatgtggccttcaagctcgacgcggccgaggatttcgcgcagctcctcgaagcgggagccgacctcgctgcccttgcccgccatcgtttcgagcaggacggtcgtcgtctgctcgggccggagaatttggttcaaggtgccggcgatcaggtcgattccggcgtctacgccctgcccgacatggctgccggggtggaaattatagaggctgtgcggcgtcgcctcgaggcgcagcaggtcgtcctgcatggcctccagcgcaaaggcgcgcgtttcctcgcttgcagagcacgggttgatcgtgtacggcgcgtgcgcgagcagcactgcgaagtggttttccgcggcgagttcgttcagctttcgggcgtcctcggggtcgagcggctttgcgcggctgccgcgggggttgcgcgtgaagaactgaaacgtatccgcgccgatggagagcgcggttttgcccatggcgtagtaaccctttgcggcggagagatgacatccgatatgcagcatagcttaatcctttcgattccagtgtttaaagatttctttggtggagcgcaccatttcccgcgcaaaggcggaggtgtatttccgggtatagagcgcctgtgtgcgctcgttcggcatcatttcgagcagctcgtcctcggtgagctcgcggtagccgttttcaaaaacgatgctctcccgcgaaaagcgcgtggtctggcggcgctcccgctgctgggcggtggggtagccgaaaaccagcatgcagaccggcgcggtctgcggcggcagcttgagaagcgcgcggtgctcctcgaaattttcgagaatgtcaccgatgtagcacgagccgacgccgagactttccgccgcagtgcaggcggcgtgcgcggcgatcaccgcatcgcttgcggcgagaagcaggtcgctcagctccggcgcgggcacatcgccgccgtcacagccggcgagcctgaattttcggtgccagcggcggtaatccgcacagaaaatcagcaccattttggccgaggcgataaacggctgattgtcgcaggtgacggccagacggtccttgattgcctgatcggtgatgtcgagaatcgaatagagcatcatatttccggcggtcggcgcgcgcattgcggcggcgaggaccgcgtccttaatttccggcgcgatttcccggtcctcgaagacgcgcacggattttcgttcggccagcaggcggatcgtatcgttcataaatgagtagctcccgtccaatcaattttctccagtgtaccacaaaagcggcgggatgtaaattccgtttgccgctttgggttgacaaaattaacagcggcgttataataatatcaaaaggcgttcggggaggaatgcggtgtggagctttatcagattacgggcaggctgcataagctggagcttgtgcgcatgctggcgcagagaaaggacatccggaaggacgggctgtatgcgggccagatgcccgtgctcaactatctggcggagcaccccggctgcacacaggtggaaatggctgattttttgcaggtgagcccggcctccgtcgcgctttccacaaagcggctgcaaaaagccggctacttgacgaaggaggtcgatgcggagaacctccgctgcaagcggctgtacctttcggcgcagggggagcgcgtgcgcacgctctgccgcgagaagatggatcagctcgaccgcaaggcgtttgccggcttctccgaggaggagctgcgcgcactcgcgcagatgctcgaccgcatcacgatcaatctgacgggcgaggcggaaaacatcgtcaacggcgagacattcggcagcctgcaccggcagctcgagagcatggaccgggtggaaaagaagggctgagccccgcaaaaaacgatgtgttttatcacagcgctttataaaaatatcaaatacaacgcggcatccattcattataattagggtgaatccgcattgaggaatttatgcaatgccgatgaatcgagcgaaatttcattttgacaatacctacgccagcatggacatgctgtacggcccgtacatcctctaccagatcggggatttgagctgcgagccgggctaccagacctttgagcacgagcaggcggtttacgaggtcacctgcgtgctttcgggcagcggcacattttatgtggacgcgcaggcgtacagcatggaaaagggcgacctgctcatcacgcgcaagggagagatgcacaacatcatatcctccgaaagcgacccgctgcgctacttctacctcggctttgatttcgcacagccggtgcagagcgagcacgttttccagctcaagcgctttttcgaccagaccggcgaggtcaaggtgtcgaacggccgcggcgtgcaggatgcgtttatgaagattctctccgaattcatttcggacgacatcctttcgaatcttctgatcgaggcgtatatgcacgagatcatctgcggcgtgtaccgcattttcagccgccgctattacagaagctaccttctgagcggcagcaacaacacagacgaaaagctcgtctacgatgtgatcaattacatcgacgtcaatctggaatcgatggagaatctcagcgcgctcagccgcgaattcgggtacagctacacccatatcgcgcagaagttttcggcgctgaccggcgaaagcctcaaggcctaccacacgaagcggcgctttgaaaaggcgaacgaatacctgcgcgaggggtattcgatcacaaaggtcgccgagctgatggggttcaagtccattcacgcgttcagccgtgcctacaagaaatacgtgggcattgcgccgcgagaatataaaaaacgggaagaggagagccgcagggcatcggcctcgcccacggaaaacagttaaaggagtttttaccatgaaagttgccgtcatcggatgcggtacgattgcaaatgcagcgcacatcccatcctacatgaacaacccggaagcggagatcaagtatttctgcgacatcatccccgagcgcgccgaggctgccgtggagaagtacggctgcggcaccgcggtcgtcgactaccacgatgtgctcgccgacccggagatcgaggccgtctcggtctgcacgccgaacaacgtgcacccgacgatcacgatcgacgcgctgcgcgcgggcaagaacgtcctgtgcgagaagccggcggcgagaacgtacaaggaagcgctcgagatgcagaaagtgcagcatgagacgggcaaggtgctgaacatcggcgtcgtcaaccgcttcaacgacagcgtcaacctgatcaagaaatacatcgacgacggcaagctcggcgacgtgtaccacgtatatgcgagcttccgcgcccaccgctcgatcccgggcctcggcggcgccttcacgacgaaggagatcgcaggcggcggcgcgctgattgactggggcgtgcattacctcgacatcgtcatgtactgctgcggcgacccgaaggtcaagactgtcacgggcgaggtgttcagcaagctcggcgtcgacatgaagggctatgcgtacaaggatatgtgggcgggccccccgaagtacgacggcgtctataacgtggacgattcggtcgtcggcatgatccgcacggacggcccggtcatctccctgcacggcgcgtgggcgcagaacatcggcgtcgcggagcagtacatcgacttcatcggcgataaggccggcattcgcctccagtacggcaaggacttcacggtctataccgcggagcacggcgcgctcgtcgagtacaagccggagttcaacatgcgcgaccacttccagaacgagatcgacgcgttcatcaactgcatcaagaccggcgagaaactgccgtcgcacatcgacacggtgattatcaccgcgcagatgatgcaggcgatctacgattcctccgcggagcacagggagatcgtgctcggcgaataagcccgaaaaacagcatttcagaaaggacggttttctatgtatcctttttccatcggcgtcctgatggacggtttccgcaccgacacgctgaccgcgctcgataaggccgcggccgtcggcgcaaagggcattcaggtctatgcgacaaagggcgagctttcgccggaaaatatgaatgccgaggcgcgccgcgagtttttaaagcgcgtcaaggaccacggcctcgtcgtttccgcgctctgcggcgaccttggccacggcttcaataaaccggagatgaacccggagctgatcgagcgctcgaagcgcatcgtcgatctcgcaaaggatctcgaaaccgacgtgatcacgacgcacatcggcgttgtgccggcggatccggcgcacccgcgctacgcgatcatgcaggacgcatgcggcaagctcgccgcctatgcggattcgatgcaggcgcatttcgcggtggagaccggtccggagatcgccgtgacgctcaaggcgttcctcgacggcctgcattcgaaaggcgtttccgtcaacctcgacccggcgaacttcgtcatggtcacgggcgacgacccggtgcaggcggtctacacgctgaaggactacatcgtacatacgcacgcgaaggacggcaagcgcctccactatgtggagccggagatcctctacggcatggaggaatccgatatgctgcaggatacctcgttcatcgagctgccgctcggcgagggcgacgtcgatttcccggcatacctcaaggcgctggacgacatcggctacaagggcttcctgacgatcgagcgcgaggtcggcgacgaccccgagggcgacatccgcaaggcggtcgatttcctccgcgcacatatctgagcattattttgcacaatggggaaggacggcacgcgccgcccttccttcatctttctgaaggagggaaaacggaaatgaaagaacgcgaggtttgggatgcagtcgacgccaagggccggaagctcggcttcgacctgtaccgcgacgaatgggacacgccgcgccgcccggcgggggcgtatcacgaggtcgtggagatcgtcgtctttacgagacagcgcgaggtgctcgtcacccagcgcgacccgaagaagcgctacgggctcaagtgggaggtcaccggcggctcggtgctgaagggtgaaaccctgcttgcggccgctgtgcgggagctgcgcgaggaaacggggatcgccgtttcgcaggcggagctgacgcagatcgaccggcaggtgcgcgatgacccgccgagcatataccacgtatacgccgcgaccgtgccggataaaacggtgccgatcacgctgcagcccggcgaaacggtcgacagcaaattcatttcgttcgaggattttttgaaagcggcgtacagcgaggactatgtgctctggtgcgtgcagagctgcgggatgcagcttcgccgctatgccgatgcaatccgatgacggcgtgaaaaaaacttatgcaatttcggctttcctgttgtattccgtaagcttctgtgctagaatctcaacggtcaaaataaagcgggcgcggccccgcacaggagcgctgtaaaatgaataacccagtcaaacgcatcggccgggccgaaatcaataatttccttctggtcactctcggcacggttctcacggccgtcggcatctatttctttaagtttccgaataatttctcgacgggcggcgtcagcggtatttcgattttgctcggtcggcttgtcccgttcctttcgccggcggtcacgatgtgggcgatcaacctgattttgctgctcgtcggcttcctgtttttcgggcgcggcttcggcctgatgacggcgtattgcagcatgctgtactcgtttcttacctggctgtttgaggtcatttatccgatgacgcagccctttacagatcagccgtttctcgaactgtgcttcgcgatgatgctgccggcggtcggctcggcgatcctcttcaactgcaacgcctcgagcggcggcacggacatcgtggcgatgatcctcaagaagtacacgagtctcgacattggcaaggcgctgcttgtgagcgacgcgctgatcgcggcttccgcctgctttgtgttcggcatccgcaccggcctgttttcgctgctcggccttgttatcaaggcgtttgttgtggattccgtgatcgagagcatcaacctgtgcaagtatttttcgatcgtcaccgcctgtcccgatgcgatctgcgactatgtcatccgggagatgaaccgcagctccaccgtgatcgacgccgtgggcgcgtactcccacgaggacagaaaagtgatcatggtggcctgccgccgcagcgaagcggtcaagctccggcatttcatcaagacggtcgatccgaaggcgttcatgttcatcaccaatacgagcgagatcatcggcaagggatttcggtcggtatagcggcacgatcggaaagggcttcctgcgcggaggccctttttgctgcgttgagaacagcccggcgcgagcgtgcgccccaaaatgctgtaaaaaggattgggtttttgcggcatttgtgctataatgataccggctttgaataccgggcctatttcgccggaaaacgtgcgtgcagcggcaaaagatgcgctttatcgggcgggaggccgcggggaagcggtaaaacggccgcgcagagccgatttaagggagggcgtctgaaatgacaaatttactgcttgcaattatttacatggcctttatcagcctcgggctgccggacgcgctgctcggcgcggcatggccgacgatgcagccggaattcggcgtgccgatctcttacgccggcatcatctccatgatcatcgcggtcgggacgatcgtgtccagcctgcagagcgaccgtctgacccgccgcctcggtgcgggcaaggtgacggtggtcagcgtggccatgacggccgcggcgctgatcggcttttccctgacgcattccttctggctgctctgcgtttgggcggtgccgtacggcctcggcgccggcggcgtggatgcttcgctcaacaattacgttgcgctgcactacgagagccgccacatgagctggctgcactgcatgtggggcgtcggcgcgacgctcggcccctatctcatgggctatgcgctgacaaacgggggcggctggaatgcgggctaccgttacatcggcattatccagatcgtgctgacggcgttccttttgttcagccttccgctctggaaaaagcgcaagggcgcgcaagccgatgcaggcgctgaaatgggtgaggcgctcacactgcggcagatcgtcgggatccccggcgcgaaggaggttatggtctgcttcttctgctactgcgccgtagagcagacgacgaccctgtgggccagcagctacctctccatttacaaggggatggcgccggaaaccgcggcgagctttgcgagcatgtttttcatcggcatcacagccgggcgcgcggtctgcggctttatcaccatgaagctgagcgatacgcagatgatccggctcgggctcgtgctgatcgcgcttggggttattgccatgctgctgccgggcgcgccggcggtggcgctggccggccttgtgctgatcggcctcggctgcgcgccgatctacccgtgcatcatccattccacgcccgaccacttcggcgcagacaagtcgcaggcgatcatcggcgttcagatggcgagcgcctacgttggaagctgcctgatgccgccgctgttcggcctgatcgcaaacaacatcaccgtggcgctgctcccggtttttctgcttttggtgcttgtcctgatggcggtcatgcatgagctcctcacaaagcgcgcgcctgtccgcaccaagcgggaggggtgagcgggggcagcgccccaaggtgccctgttgaatgcgctgtattcagcttttggctttattattagaggcgctctctgtgtttgcgacgaacaacagagaactgaacggtgcagatttcgagatgtctctgctttcatgaagttttttgattttaattagcttttgacttaatttccggttaacaaaaccaaaagcgcagacgctgaaaaatggcttgaactctagcttttttgacgtttgctgcaaaacggtgcttcagttaccttcacataattttttgcaaatatgtgagtgatctcttgttgacttttataattttggatgatatactaattttgaatccgtaaaagacttgacaggaggaacaaaatggtgtacacttctctgcacgcacgcacgcacgcacgcacgcacgcacgcacgcacgcacgcacgcacgcataaagttgtaaacttttctcaattctttctgttaagaagaaaaatagcagatataagaaaggtataactgattcgcttaattgcgaatcggttatacctttttgttttttgctggatgcggagaataattcagagaggattgaagagtatgagggcgacaaaaagcaaactgctggcattcgttttgtcggcggccatggtattggccttgccggggacagtgtttgcagcagatgtctctgtgccggagacttctgcgtgtatactgacggaaggctgtacattaactgaaggccatgagggagagtgtatactcgttccgcaaaaggaggacgatatacctgaggtttgcacacagacagaaggatgtgttttgcaggccggccatgaaggcgagtgcaggacagaagatgcggctgatgtcggcgaagcattccaagcgtgtacgttgacggatggctgcgtattggaggctgaccacgacggggcgtgtgtgacggagaagccttctgatgaggaaacagaagcaatgtgcacgttaacggaaggctgcactctgaaagcagaccatgcgggtgcgtgtataacggaagctgaaaacagtgatggcgtatctcctgcggcggacacagagaatgctgcgcgcctgcctgtcgtgtattatggcggaaccaagggcaacgatgataatacaggagcagatgagaaaaacgccgttagaacgctggagaaggcgctggaacttgtgacagagggtggcactgttatggtgtgcgctccgatatatacgaatgacgacgttgtgatagagaacgtaacactcaagcgtgcgggaggctttgcgggaaaactgctgtatgtgaacactggatcgctgacgctcaaagatgtgacgattgacggtagtaaagacaccatttcagccacagactatagcgcgctgattaattttacccaaaagaacactacgctgaacataaatgagggtacaaggcttatcaataacggcgcgatggcggtgtatgttaatgatggccaaacggtaaacatgacaggcggcgttatcagcggcaatgaatcacagacagacggcggcggtattttcgtacagggtggaactgtgaatctgaacggcggtgaaattactgcaaatcagtccgaaagatgcggcggcggtatttgcgttcttggtacaggtagtatatacttaaatggaacgagcgtctcaggcaacagcgctgtgtgtggcggtggtatttatctcgaaggccggggcggctccgccacgcttgtaatgcagggtggagagattacaggcaacagcctgacggcaaacactgatggtacggactactgggtggcagatggcgcaggtatttgcggatttggcggcaatgccgtaattgatattcaaggcgggacaatcgcaaataataacgtcagtgtagaaggcgtaggcgatggcgctggctccgcagtttccctgaataacggagatggtttgagtttcccggtgctgaagctgagtgggagcccaatgatttccggcgatgtgtttctttgggatgaagatagtacaggcccagtgattgaagctgctgctgatctcgcttgtgcggctcctattgaaataaatgcaaattatagaacgactggtactgttgccgtgcgttttccggagggcaccgatgccgtcggcaaggaatccctgtttacaacagaagatgaaatgactatgctgttgggcgatgagcatgaactggcgtggggagagacaataagagtagttttcaactccccggataatagagatacctataaaaagatttatattagaccagactcagccattgatccgtcacaagctccgacagtagaaggcggagaggtaacgccgccggccggttatattctgagcggctggagagaatatggggagcaagacttctgggattttgaaacaaaaatctcggatagaaagacgcttttagcagtttggggtctggatacgcctagcattacggtcgatcaggataaggaaagcgcccatgtaggagaacagattacgcttacagcttctgcggagcatcaagtaaaagatgccgtattttcgtaccagtggtataaggatggaaacaagctgaatggagagacaaattctgttcttacagtaacagaaagcggcagctatacggtgaaggtttcagcttctgacgggaaactgacctcggccgaagtcgaaagtgaagcggtgaattgtaccataaccgaccattcctacagcagtgcgtggacaacagatggaacaaaccattggcatgagtgcacggtgtgcggtgcgaaaaaggattctgcagcccacagtggtgggaaagccacttgcgagagtcaagcattgtgtgaagtttgtggagctgcttatggtgcgctgaatccggacaaccatactggtaagacggaagtgcgtggagataaagcggctacctgtacggcggaaggctatacgggggatacttattgcgccggctgcggagaaaagctggcggttggaatcgtgttgccgaagatcgatcatactttcggcgaatggacggtaacaaaagagccgaccgagacagcaacaggcgagaaagagcgcatatgctctggttgcggtgcaatagataaggcagagattcctgtgcttggccatacgcacagctatgggaaggattgggagtctgacgccgacaatcactggcatgaatgtgactgtggggaaaaggctgacgtagccgcccatatttatggggattggacgattacaaaggcagctactgccacagaggcaggtagccgcgaaaagtattgcacagtttgtgattataaggtaacggagagtatccctgctgctggcacgatcacgacgccaacagccactccaagtccaacagcggtgccggagaatggaggctctaagggaccacagacaggcgacacgaaccagttgcttctttgggctggtttatttacagttacaggtgcgggcctgctcagcgttttgttttataagttgaagggaaagaatagcaagtaaagatctttgaatgtaggaggatcatcttatgaattccataaggtgatccttcttttattaaaagtaagaaaacgtaaaagcaaaatcgtaaaaacaggggacagacaatctaatgaagccttcagcctcctgcacgaaacgctcaaacctccgcgttcggcgctaaccagaagcgaagtttccgcaagagaatcgcggacggaagttgttacagcaattgctggcgtaagcgaaaccgcacagccgcgggttcatactggcaatttacacgatgaccgctggcgaaacggaaatgagatacacagacggcgtaagcgaaatctatgccgagcgcacaccttatggctgcataggagaagcgggcagcaatggaacggctgcccgaaccggaacagtagccgcatttttcaacacacagtttctgcaaaggatttgcatcgttatgctatgcgaatgatgttcccctcaaggggactcaacaacttatgggatatggcgatcaaacaataactctgtactacatccaaattgaagaacaaaccgtgcgcggccagcttgaaagtttacacaacgctttgtttatatgaaaatttggaacaaatgtaaggattatcaataaaaaatctggattttatgcgagatttcacaaaagtttgattaattgttgacttaattaaaaaacgtgatataattaagcaagagcttaattaaaggtggtgctgaaatggctggaagcggggcggcgtttaaggcgctggcggatgaaaaccgtatgctgatcctgcggcttttgctgcggcgcaactgctgcgtgcgcgcgctgtcgcgtcagctcgatatttcagaggcggcggtctcgcagcatttgaaggtgctgcgcgaggccgggctgatcctcggcgagaaatccggctatttcacgcactatacggtcaatcggcctgcgctgcaggtgctttcggacatgctctccgagatggcgcgcgcggcggaatgcgtgccctgcacgccgctgcacggcggctgttcagcggcagagtttgaaaagtgccgcaacgccgcgctgacggcgcagccggccggcgagaaaatcgagtggaaaggaaacagagacatgaaaattgcagttacctatcagaacggccagatcttccagcatttcggccattgcgaagcgttcaaattctataatgtggaggacaacgccgtcgtgtcaagcgagatcgtcagcgcggtgggcagcggtcacggcgcgctggccggctttttgaaaacgcacggtgcggatacgctgatctgcggcggcattggcggcggtgcgcgcacggcgctggccgaggcgggcatcgagctgttcccgggcgcttccggcagcgcggatgcggcggtgcagtcgctcctgaacggcacgctcgtgttcaacccggataccgtgtgcacccatcaccaccacggtgaggggcatgactgcggcagccacagctgcggcgcgcacaagaacggctgtgcgggcaatcattaagaaataaggcgctgcggcacagcgcgctttatagggcaggggcatcgctcttttgagagcggcgtccctgcctttttttaaatcaaagaatatggtcgaaacgcctaatgaataattagaaatatatgcaaaacagagaaatcacattctttgccacatctttaacgccgcggtgttataatggagcgtagtcacggaggatgtgcctatgaaatataaaagctgtattcgcgatttggcgctgacactgttgattttagcggtgtcgtctgcggcgatgatctttctgcaaaaggcattcgacatgcgggcgctggcgccgatggtgttcgtcatggcggtttttctggtttcgctgacgacgcgcggctatctgtacgggatcgccgcgtcgctggccggcgtgctcgctgtcaatttcgcctttacttttccgtatttcgagctgagcttttccgcgccggagaatgtgttttccggtatcgccatgctttttgtcgctgtgatgacgagcacgctcacgacgaacatcaaaaagcaggagcgcatgcgcgcggaaaacgagaaggagaaggttcgggcgaacctgctccgcgccgtttcccacgatctgcgcacgccgctgaccgccatttacggtgcgtgctctacggttgctgaaaactacgaccagctggaaagggaacagaagctgaagctcctgcacgaggtctgcgccgacgccgaatggctgaaccggatggtggaaaatttgctctccgtcacgcggatcgacagcgggcaggtctccgtgcagaagtcgccgacggtgctcgaggagctggtcgacgcggtgctcgtgaaattccgaaagcactatccggggcagcccgtcgaggcgcagattcccgaggcgttcatcatcattccgatggattcgattttgatcgagcaggttattatcaatctgcttgaaaatgcggtgttccatgccgccggcatgacgcggcttgtgctgcgcgtgtctgcgcgcggaagccgcgcggttttcgaagtttccgatgacggctgcggcattccggcagagcggctcgaatcgctgttttccggcgcgggggagcgcgatgcgccgcccgcagacagcagccggcacagcatggggatcggcctttccgtctgtgcgacgatcatccgtgcacacggcggtgagctgcgtgcggaaagcgccgtgaaccgcggcacgacgttccgctttgcgctcgaaatggaggaggacgcgcatgagcaacaataaatttaaggttttgatcgtcgaggacgacgcgaacatcagcagcgttttggaaacgctgctgcaaacggacggctatcaggcgctgacggcgcggacctgcaccgcggggctcgcgcttttccgctcgcatacgcccgacctcatcattctggatctgggcctgcccgaccgcgacggcatggagctgatcggcgtgatccgggaaaagagcgccgtgccgatcattgtgctttcggcgcggacgacggagcgcgacaaggtgatggcgctggaccgcggcgcaaacgactacattgcaaagccgttcggcagcggcgagcttctggcgcgcgtccgtgcggtgctgcgcagcagccggcacagcatgaccggcatgctgcccggcaggcggtttacagcgggcggcctcgtcatagattacgaccgccggcaggtctttgtggacggcgaggagatccggctgacgcagacggagtacaacatcgtcgttctgctctccgagcatgccggccgcgtgatgacgtatgcggcgatcgtccgcgcggtttggggcggcgccgattccggcagcaccaagcgcctgcaggtcaatatggcgaatatccgcaagaaattcgggagccggccgggcgataatccgtatattcagaacgagctcggcgtcggataccgcatgctcgaggaggatgcggggaaaagctccggcaatatgccgggagcatgcatgtggacggacgctttaaaataatgaggtgaacccatgattaaactgatcaaaaaacagtcgccggcgcgcatcattgcgctgggctttgcggcggtgattctgctcggctccgtcttgctgatgctgccgtgcagcgtgcaggacggcgttacggtgcggtacatcgacgcgctttatacatcgaccagcgcggtctgtgtgaccggcctgatcgccatcgacgccggcgatacgtttacgccgctcgggcagttctttctggccgcgctcattcaggtcggcggcctcggcgtgacggcggtcggcgccggcgtcatcgtggcgatgggcaaaaaggtgaacatgaaggggcggcatatcatccgcgaggccatgaacctcgattccggcaagggtacggtccgctttgtcaagaacgtctttctgacgaccgtggcttttgagcttgccggcgcggcgctgagcttcatcgtttttgtacaggattatccgccgctgaaggcggccggcatcagcctgttccattcggtggccgcgttcaacaactccggttttgacatcctcggcaacatgcagaacctgatcccctatcaaaaggatgtgctgctgaacttcgtgacctgcgggctgatctttttcggcggcatcggattcctcgtgatccgcgagatcgtgacgaagcgctttcactggcgcaggttttccatgcacacgaaggtcgtgctgacggtcagcgccgcgctgattgtgatcggcacgcttttgatccggctgacggaggacgtcacgtggctcggcgcgtttttccacagcgtttcagcgagaaccgcgggcttttccacgtattcgctcgggcagttctccaatgccgggcttttcgtcatcgcggttctgatgtttatcggcgcctcgcccggatcgacgggcggcggcatcaagacgagcacgttcttcgtgctcttgcagggcatcaaatcagcggcgacgaataaatcggaaaaggcgttccgctatgcggtgccggcagaatcgttccgcaaggcggcggtcatcacgctgatggcgctgggcgtcgtcgtcaccggtacgtatctgatggtcatcatggaaccagatgtctctctgatggacgcgctgtttgaaatcacgagcgcgttcggcaccgtcggcctctcgaccggcatcacgccggggctgagcgacggcagcaagctgctctctattctcaccatgtacatcgggcggctcggcccgctgacgatcgccacgctctggtactttacgaagggcgagcggaccagctaccccgacggcaatatttcaatcggctgatgcaggaggaaatgaaaatgttcaataaaccgaagaaggaaaaggaaacatacggtattgtcggcctcggccgtttcgggtatgcgctcgcgatggagctcgcggaggcagacgccgacctgctcgttctggataaggatgaggaaaaggtgcgggagatccgcgagtacacggaaaatgcgtacgtcgtcaagagcctcgacaaaaaatcgctggcggagaccggcatccagaactgcgatgtggtggtcgtctgcatcggcgagcagatggatacctcgatcctcacgacgctgcacctcgtgagcctcggcatccccacggtgatcgcgaaggcgaagagcgtggagcacggcgagatcctcgaaaagctcggcgcggaggtcgtttatccggagcgggacatggcggtgcgcctcgcgcaccggctcgaaacgtcaaaaatgctggatttcgtccacctgagcgagcaggtcaatatctcgaagatcatgattccggaaaaaatgctcggcaagaccgttctggccgtggatttccgcgggcggttcgggctcaacatcatcgcgatcgagaacagcggcgcagtgctggatacgatcaaccccgattacgtgttccgcagaggggatatcctgttcgtttccggcagcaacgcgggcctcaatcgcctgctggagtggacggagaaaagctgagagatcggctgaaaaaggaaaaagcatccgaagccagcgcagagcgctgtgcccggatgcttttctttgtatatgcgcagaagcggttacgccggctgcgccgtgtgcgggcgcaggatgcggtgtgcggtaccgccgccgctgcctgtgtcggcgatcacgcggctgcggttcaggcgctcgatggtggcggtgatgtcctccgcggtcgtttcggggttcagcgtgcagatgcgcagtacctttctcccgtggatttccgtcgtaaagatttgtgcgaagccgctcgtggtgatttcccgcgcgatgtcgcggttgatctggtcggcgatggccggggacgcgccgttttcaggcacgtagcggaagttgatgatgccgaactgcgcgcgggagacgatttcccaattcggcaggcggcggagcgtttcctccgcgagctccgccatcgcgcaggcgtggtcgatcgtgtcgccgagcgcgcggctgccgagcacctgcagcgtgctccacagcttcaggccgcgcgccgggcgggtcagctcgggcccgaggtcccagaattccacgctgtccgcgtcggattcggcgtccttcaggtattccgggtgcgcggcaaagctgtttacgaggcaggcctgatcccgcacgaggacgacgctgcacgcgtaggtctgcatcatccacttgtgcgcgtcccagctcaggctgtcggaaagctcgatgcccgcgagcttttcgcgctggcgctcggagaggagcgccgaggcgccgaatgcgccgtccacgtgcatccacatgtcccgctcgcggcagagcgcggcgatttccggcagcgggtccacgctgcccgtgttggtcgtaccggccgaggcgatgacggcgaacggccggcagccggcggagatatccgcctcaatctgcgcccgcagtgcggcaagatccatgcggaagtctgcgtccgacgggatcttccggatttgatcggcgcgaaagccgatgatgtgcagcgccttggcaagcgaggaatgcgtctggtcggagatgtacaccgcggcgccggcgcgctccgcatcggtcagcttggcgtcgcgcgcggcggtcagggcagtcaggtttgcaatggagccgccggagacgaacagcccgccggcagtggcctccgggtagcctgcaaggccgcacatccagcggatcagccgtttttctacgcaggccgccgccggagcattcaccttgcagctcgcgtgcgggttataggcgctcgtcatgacgtcgcccatccaggaaaacagcgaggccgggccggggatgcacgcgaagctgcgcgggtgctgggcgagcgccgtgctcgcgtaaacgtcgcggagcagctcgctgtagacggtctccacagggcggccttctgcggggatctcgccgcccgagatgcgctcgagcgcgtctgtatccgccggggtgctgaccggtcggtccttcatatcgccgtaaagcgcgagcgtacggtcgatgaaatccttcatcagatcaccgagctgcgcctgctttgccttcatgctggaattcatttgcgttacctccaattgcttgacgttctctgcgccctatggtatcataaaatctgtcatttgtaaaattcatggattttataatattgattaaaatttttgataatagggggcgtgaagcatatggagattcggaacatcacggcgtttgtgcgcgtcgcggaaacgcagagcttttcgcgggccgcagagcagctcggctattcgcagtccgcggtgacgatgcagatcaagcagctcgaggatgcgctaggcgcgcagcttttcgagcgcatgggcaggcatgtgacgctcacgcaggcgggggagcggctgctgccccatgcgcttgagattttgaatgctgtgcggcgggcagagagcacggtgcaggagccggaggcggtgacggggcggctgcgcatcggcacctccgagtcgcatctgatcagcgttctgccgccggttttgatggaattcggcgagctgtgtccgcgcgtggaggtcagcacgcatacggcgctggtggccgacctgttcgacatgctgcgccgcaacgacgttgatatcctgtattttctcgacagcaaggtggattttccggagtgggtgaaggtgttcgagcggccggaggccatccattttgtcgcgtcggcgtcttcgccgctggcggggcggcgtcaaatcccgctcgagcggcttttgcaggagccgctgtacctgaccgaaaaagggatcagctaccggtacgcgatggagcaggtgctcgcggccaaggggatcgagctgcacccgctgctggaaacgggcaacacagacgtcatcacgcgctttctcctgcagaaccgaggcatttcttttctgcccgcgtatgtggtgcgcgaggcggtcgcggccgggaagctcgccgtgctggatgcgcagtgcccggagatctgcatgtacagccagcttgtataccacaggaacaagtgcgtcacgccgcagatggagcgctttgcgcagcttctggtggagcgcgtcgacggctgacgcggctattcgtgcagggggacctgaatctgatacgtccattgcaggatgccggagacgacgatgcgctgcacggtaaaggccggctccgtgcgggtgcgcgcgcgggcgaagcgcaccgcctcctcgagcttctgtgcccggttttcctccgtgcagtcggcgcacaggtagtcacccgccggaagcgttttcagtccgtccgtctcgccgtgacggatgcagaccgcgaacaggcgggagcgcccgcctgccgtgtagatgcccgccatatcctcgaaggcgaagcgctcccgctctgcgggcgcgatgcggtcgtaaaagtgactgaggtaattccagagaacgtcgagcgacggcgcttccagcatgtccgaaagcaaaatggtgcgcgcgggaaaggcctgcgtgtagcacgagggcctgctctgcacggcgcgcaggttcttttcatagctttcccgggcgagccggattttctccttgctgtactgcagctcggcgattttccggtccgcctttttttcagcctcggcgagaaaatcgacgacgcgccgcaggtcgtcgtagtcgagcacatcccggatctcctgcagcgagaggtccatctggtgcagcgcgtggatcgtgttcaggcgcacgatgtcctcgcgggaatagcaccggtatttcccgctgccctcccggcgctttgcgtgcacgagcccgatgcggtcgtaatgccgcagcgcctcgctcgtcatattcacgattttggcggtttcaccgatcgaaaaaaaatctttcataaagtgcaaatctcctcttgacctttgtgtaacacaaaggtttataatacattatagcacgggaaaaccgaaaaatcaacggcgcgctgcggcgcgttaggagggatacagatgatcgagctgatcggggtaacgaagcgctaccggcagacgccggtgcttcgcagcatttccatgacgatcgacgcgccgggcatatactgcctgctcgggcgcaacggcgcgggcaagacgacgctgctcaagtcgatcgccgggtatcagaatatttccgaggggaagatccttgtggatggcagggccgtcagcacggcggccatggatacgggcgtgagctacatcgaaaactttgcaaagcatttcaacctgccggtgcgcaggctgctgcgcatcgccggagagctgaacccggaatttgatttcgacttcgcctttgaaatgatggaccgctttgagctggacggaaagaaaaaattcagccacctttcgctcggcatgaaaacgatggtctccacgatcgtctgcctctcaagcaacaagcgggtgattcttctggatgagccggtcctcggcttcgatgcgatcatgcgcgtcgaattttacgacatgctggcggagagcttccggcggcacccgcgggtcatcctcgtctccacgcatatcatcgaggaaatcgcgaaaaccattcaaaagctcattattatcgaccgcggcagtatctgctttttcgatacgcttcaggcggtggaggaaaaggcgtggagcgtcagcggcctgaaacgggacgtggacgccgcgacgcagggccttcatgtgatcggcgaggaaaacgtcggcgggcttgtgacgcgctgcatcttcgacgcgccgccgcaggcggaaagctccctcgagatcaccccgctctccctgcaggatttcttcattcagatggtggggcataaaggaggggtccgaaaatgaaagcagcttttaccgttatgcggcgggagctttcgagcaaccggatcagctttatcgttacggcggctgtcgtcctctgcgcgacgacctcgggcgattcggaaattgcgctgagcaatggaaattacacgtggcttctcgccgttctgtcgccgtttttcttcgtgttttacgactgcgcgaagctgatgcacctcggcgccgacaagcgggattactgcgcggggagcctgatggcctacggcgcgctggcgctgctcgtctccgcggtcaattccgtgttctgctatgcggtagacccgctcaataaagcgcagacggtcgtcaacatgatggggctgtgcggctggacgaaaaacggcgctgcagcggcgtttttgcagcaggcgctgtttctcttcctcgtcatggtgtttctgcacgcgctgctattggcgcagtcctactggtacggctggcttgcggacggcctcctcgcggcggtcatctgcgtgttcacgccgatcgagcctttgcgccgcgtgctcgccgggttcttcggcatcatcatgtttaattcctcggcgctgccgcacatagcggtctgcgcggcgctcagcgctgcgtttgccgccgccggcattgccgtactgaaaagaaaaacgctttgatttttaaggaggctgttatgaaaaagataagttggctcgcgctgtgcgcgctgctcggcgccgcggtgctggtgggctgcggcgccggcgaaagcgagccgttcgaggagaaaacgtacacggcgcagacggagcaggtgcgggaggtccgcttggacgtgcgagacagaagcatcgaggtctctgcgtcggaggacgggcagatccacatcggctgcgcggagaacagcaaggaatactatgaaatcggcgtttcggaggacggcgtgctggagatgacggccgcgagcgataagagttggacggattacatcggcggtaaggctgcggccggcagccggaagatcacgctgcggctcccgcaggcgcagctctccgcgctcgcgctttacacaacgaatgagaacgtcactttctccgatttctcagcggggcggatcaccgtctccgtgaacggcggcgatattcagttcgactgcctcgatgtggaggaaaagctcgatttgcaggtgaagaacggcggcatcagcggcacggcggcgggcagccagagcgactacgcggtgacctgcgccgtcaagaagggcgagagcacgttgcccgcagaggcggacggcgggccgaaacagctcgcagtatcggcgaacaacggggacgtgaacatccgctttgccgggtgatgccggcatgcccggcataaaggaacaggagacaggcgggaggccggcagacgccggtctccctttgcgtgcgggaagcgggcggcgcacggcgcttccgcggagaaaacggcttttccgcgggcagcggcaggcggacggacaacgggaaatttttgccgcaaaaacggaggtgaaatccgaaaaagagattgacaaaggaggggggaaagagtaaaatacagaatatatgaacggcttaacaatttattcacaaggccgttacaaatttatttcagattatctgcgggtaatcgcggatacaggaggaaaaaagtcatgaaaaaggtactgagcatcattcttgctctggcgctgatctgtgtggctttcgcggcctgcggcaacggcgaaacgtcgtctccgtcgtccagcgagccgtccgaaagcgcgcaggattcttctgtcgcagaagaatcctctgaggcttccgagtcctcggctgagccggcgggcgaggttagaaagatcggcattctcgccccggcggtcacgcacggctgggttgcgggcgttgcgtacaacgccgagcagcgctgcgaggagctgcagagcgagggcaagatcgagtataagttctatacgagcaacaatgcggaggaaatgaccacacagctcgacgaccttaagtcttggggcgcggaggcgatcgtcgcttacccgcagtgggaaggcatggaggttccgatccagcaggcgattgacgaaggcatcgtcgtcgtgaacttcgacatcgagatcgcggcggacggcgtgtaccgcgtgtccggcgacaacgagtcgatgggcgttgagggcgcgaagtacatcgtcgataagatcggcaccgagggcaccgtcattgtgctcgacgttccgacgtccggctccgttgcggagctgcgcaagaagggcttcgaggaaacgattgccgagatcgcgccggatatgacggtcgagacgtatgcgacgaagttcacgcgtgaggacggcctcgccgacttcgcggacatcctgacgaagcacgataagatcgacgccgtctattcgatggacgacgagacctctatcggtgttcttcaggccattgaagaggccggcagaaccgacatcaaggtcgttacgggcggcggcggatgtcaggaatacttcaacatgatgaaggataacgagaacatctggattgagtcctccctctacagcccgctgatggtgcaggatgccgtcgatatggcggtttccatcctgaacggcgatgaggtcgagccggttaagatcatcccgacgaccgttgtcgacagagacaactgcgacgagtatatcgacccgaacaatacggtctattgatccgaacggattgaaaaaggggttgttgcgagagcagcaaccccttttgtcgaaggacagaaacaacctcgcgaaagggaagtggtcgtcgatatgacacttgaaatgaaagggatttacaaatccttcggcgcaaacgatgttttgcgcaatgtagatttcacgctcaagggcggcgaaatctgcgcgctgctcggcgagaacggcgcgggcaaatcgacgctgatgaatattctgggcggcgtgcaccatgccgaccgcggcgaaatttttctcgacggggaggccgtccgctttcagacgccggcggattcgctccgccatggcatcgctttcatccatcaggagctgaacctcgtcaacgatcttgcgatttacgagaacatgtttatcggccgcgagcttcggaaaaaaagcggcctcttggatgcccggcagatgattgcgcgcacgcaggagatttttgcgcgcatggatctcgacctcgacccgcgcacaatggtgcgcgagctggacgcctcctacaagcagatcgtcgagatcgcccgcgcgcttttgatggaggcctcgatcatcatcatggacgagccgacgacctccttgacggagccggagatcgagcgtgtttttgatatgatgcggacgctgaaaagcagcggggtcggcatcgtctttatctcgcataagctgcgggaggtcatggagatctgcacgcggtttaccgtgctgcgcgacggcagcatggtgtctgccggcagcatcgaggaaacctcggtcgacgggctcgcgcgcgacatggtcggccatgaggtacgcacgcagtcgctgcgcaaggcgcgggaaatgggggcggctgttctcggcggtgaagggctgacgctggagccggtgttccgaaacgtcagcttctcggtgcgggcgggcgaggtgctcggcttcacgggcctgctcggcgacggacgcagcgagctgtttcaggcgatcttcggcgccatgcgcgggatgaccggcacgctctccatttccggcagcccggtgcatatccgcagcacggtgcaggcgctcaaagccggcatcggctacgtgccgcgcaaccgcaaggaaaacggcattatcaaggatatgagcatcctcgaaaacggctcgatcgtcacgtggccgcgcgacaggagattcggcctgctggataaaaagaagattgaaagcggctttgcgcgccagcggcaggacctgcacatcaagctcggcgcgctgagcgaccggatcggcagcctttccggcggcaaccagcagaaggtcgtgcttgcgaaatggctgacggcgaatccgcgcgtcctcgtgttcgataacccgacgcagggtgtggacgtcggcgcgaaggaagagatttacgacatcatcctgaagctggcggaggcgggcgtcgccgtcgtggtgctttcgagcgaggcgcaggagatcatccgcgtgtgcgaccgcacgctcgtgatgttccacggcagcgtgtgcggcgaactcgtcggggatgaaatgaatgagcaggcgatcatgcgtcttgcaacagggggacaggtataatgaacgaaaaaacgaagaacaggaatttcggcgcgtggctgcgcaataactggaaaaacaacgcgcttttctctacgggtatcgccctgatcgttatggtcgtcctccagacggtcgcgctcggctttgattacgcgagcttcggggagtggttttcggcgtggacgcgcaactggctcaatatcctgcgcaataactcgagcgtcggcatcatcgcgctcggcatgacattcgtcatcatctcgggcggcatcgaccttgcggtcggctccacgctcgtcgcggtcggcgcgatcgcgatgtgcctgatggatgcgacgaccggcggcctgctcggcacgatcggcatcaccggcgtgccagcatatatcctgacgattttgatcgcggtcgcggccggtacgctgctcggcgcgttcaacggcgttctggtcacggcgggccgtattccgccgtttatcgccacgctcggcgcgatgaagatcctgcgcagcgtgacgcagtatttcatgcagacgaattcaccgaaggtgccgagcgatttcctccagatcgcgagcgtcaagatcggcgggcagatgctgatgccggttttctactggctgctgctcgcagtgattctgtacatcgtctcgaagaaaaccgttttcggccgccacgtgtttgcggtcggctcgaatgaaaaaacgacgcggctctccggcatcaacgtcaaccgcgtcaagctcggcgtttatgcgctgatgggcgccgtcgtcgcggtcgcagcgcttttgcaggtttcgcgcatcggcgcgatggacccggcaaatgccggcaacggctacgagctcgatgcaatcgccgcagtcatcgtgggcggtacgagcatgtccggcggcaaaggctcggtggtgggcaccgtgttcggcatgctgatcatcgctgtgatgaataacctgctgaacctgctcggcgtggacccgttcctgcgcgaggcgttcaagggagcaatcatcatcgccgcagtgcttttgcagcgcaaatcctcggataattgaatctcgggccgcggcggggcaggggcttcgccgcggcctttgcttcgcgcatttcccgggaaatatgcgatatttcgaaataggcttgatttttttcgcggattcatctataataaaagggacaaaaaatttcctttatggaggcagaaacttatgttggtatcggcaaaggaaatgctggacaaggccaaggccggcaaatatgccgtcggtcagttcaacatcaataacctcgaatggacaaaggcgattctcctcacggcgcaggagaacaattctccggttatcctcggtgtgtccgagggcgccggcaagtatatgtgcggctacaacaccgttgtcggcatggtcaacggtatgctcgagacgctgaagatcacggttccggtcgctctgcacctcgaccacggctcctatgagggcgctttggcgtgcatcgatgcgggcttctcttccatcatgttcgacggttcgcactacccgatcgaagagaacatcgaaaagacgaaggagctcatccgcatcgcgggtgaaaagggcatctccgttgaggctgaagtcggcgcgatcggcggcgaggaagacggcgtcgtcggcagcggcgaggtcgcggacccgaatgagtgcaagatgatcgcggatctcggcgtcgacatgctcgcagccggtatcggcaacattcacggcaagtatccggccaactggaagggcctgagctttgacgtgctcgcgaagattcaggagctcaccggcacgatgccgctcgttcttcacggcggcacgggtatcccggcggacatgatcaagacggcgatttccctcggcgtttccaagatcaacgtcaacaccgagtgccagcttgcgtttgctgaggcgaccagaaagtatgtcgaggccggcaaggatctcgagggcaagggcttcgacccgagaaagctccttgcgccgggcttcgaggcgattaaggcgaccgtcaaggagaagatggagctgttcggttccatcgataaggcctgatctcttaaataattattaaatttacggaacgcgccggttatccgacgcgttcctgcctttttcacccctcgcggtatcttgaaactttgcggaggttgtgctatactgatacaaatcgaggggcattttaccgcgcgcattgtgaataatgcgcctgcggtttgaatttggggttccttggagagcagaaaggaaatgtccatggacgcaaataaaacgtactgcatgaattgcttttcagcgatggacgtgccgggcgagccctgcgcgcactgcggctggaaggacgaggggcagatgaaaaacgcgctgccgtacggcacgctgctcggcggcaagtacctgatcgggcaggcgacgcgcatcaacggcgcgggaatcacctatgcggcgcttgaaaaggacacgaaccagaaggtagaggtgcgggaattcctgccgaatacgcttgccttccgtgcgccgaacggcctttccgtgaagccggcagcgggcgcagagctgaagtacgacgattatctcagcgagtttgagcgctacacgcagaagctgatccgcgtctcgggtacgaagcgcatgatgacggtgctcgataccttctcggagaacaacacgcagtatgtcgttttcctatatgtggagtctgtttccctgcgcagctatgtggaagcgcacggcctgctttcctgggccgactgcgagcagtatttcacaccggtcatctacgcgctcggcgccattcacagccagaatgtggagcatctcggcatttcgccggagacgctgcgcattacgccggacggcaagctgattttgacggacttcgagatgcagtccgtacgccgcgcgggcacggacctgatcgaggatatttacccgggctgctgggcgatcgagcagtattccaagacaaaggtgtgcgacgaggttaccgatgtgtacggcctctgcgcctcgatgctgtttgcgctttccggcgcggtgccgatggaagcgccaaagcgcaagaaagacccgcgcctgctgatctcgaaagcgattttaaagcagcttccggagcacgtgattcccgccattgcaaacggcctgcaggtggatgcggaccgcagaacctcgagcttctcgcgcttttcagcggagctggccgcagagccgaccgtgatggagcagatggtggagaccgagacggtgcgctcgctgccgacgggtgggagaagcccgcgccggcacgggatgccgctgccggtgtggctcttgctctccttcgtgttttcgctggtcgtgattctcgcggtcgcaagcgtctggttcaaggacagcgcgttctccattcagagtatcatgcagtccctcgcggagacgggcgcgccggcggcggagatgattgaagtgccgaaccttgtcggcgaggattacacggaagtggaggcgcggacgcagaccgacgcgcagtacaacttcaagctgcacatctacgaggaaattttcagcgagagcgttccggcggggcagatcaccacgcagcttccgctgcccgggcagcagcttgaggcgggcggaaccgtgcgcgtggcggtcagccgcggctcgaaggagcgcacgctgccggatatcgccggcatgacggcggagatggcaaagacgacgctggaaaaagagggctttgtcatggccgcggtggatgcggtgagcgatgaggtagagatcggcaaggtgatcggctatgcggattatgagccgggcgaagcgctcgcattcggctccgtcgttgcagtgcgcgtcagcgcggaggaatcggcggagagcggcgcggaataaagcaaatctttgtaaaatgaatcgagcctcctgcatggaagacgcaggaggctcttttgcgtttgtttgaactgtgcatcgcttcgcagcgccgctataagggcgggcgcagtaagcgcaaagaggtgcggcttatcggcggcaaatgcccggggcagccgcgcttacttgtacatcgccatgtagtcgccgtgcgcttcgatcagctcgtcgcacattttcacgatgtcgtcgatcgagagctcggcagccgtgtgcggttcgagcatcgcggcgcggtagatgtcctcgcgcttgcgcgtccgcgcggcctcgatcgtcatcaactgcgcgttgatatttgtcatattcatcgcggcaagctgcaccggcaggcggccgacatgacacgggttgatgcccatgcggtctacaaggcacggcacctcgacgcaggcgtcggcgggcaggttgtcgatcaggcccgtattcagcacattgccgccgatcttgtacggcacgccggtgagaattgcctccatgatgtacgaggcgtattccgccgagcgcgtgtgctcgatcttgccgtcctgcaaaatattggctttttcttccttccagcccttgatctggttgacgcagcggcgcgggtactcgtcgagcgggatgttgtacgcctcgatcagctccggatatttcgacttgatgaacagcgggttgtactcggcgttgtgctcgctcgactcggtgcagtagtagccgagccggcggatgtattcgtagcgcaccatgtccttgtgcttttcggtggcgttcttttcggcggcgcggcgtttgatttcgggatacaggtcgcggccgtccttgtcggtgatcttcaaaagccatgccatgtggttgatgccggcgatcagctcgcggcgtccctcgagctgatcctccatgccgaggccggtcagaagatcgcgcgagcaggtctgcacgctgtggcataggccgacggttttcacaccggtatagcgctgcatatagccggagagcatcgccatcgggttcgtgtagttcaaaaaccacgcgtcggggcagacctcctcgatgtcgcgggcgaagtcctcgagcaccgggatcgtgcgcagcgcgcgcatgatgccgccgataccgagcgtatcggcgatcgtctggcgcaggccgtattttttcgggatctcgaaatcgatgacggtgcagggctcgtaaaagccgacctgaattgcgttgacaacgaagtcggcgccgcgcagcgcttccctccggttttcagcgccgcagtaggtcttgagcacagcgcggccgccgtttgtattgcggttgatggcgctcagaatgaggtgtgattcctcgaggcgctccgcatcgatgtcgtagagggcaatctcgctctcgcagagcgcgggcgtgcacatgcagtcgccgagcacgttgcgcgcaaagacagtgctgccggcgcccataaaggtaatttttggcattttgaatccatcctttccccaaaaagaatcttttgtaatgaaatctttttgtgcttttattataagcggagcgcatgccgcatcgcaatagcttttgtttcaaaaaattgtcgttttgttgtattttccacgcgggtatgctatactgagagcacggaaagcggaaggggagaaggacatggatacgatcaagcaccgcgcggagaatctgaacaacggcggttccgtcacggtctactactgcggctatgaaaagtgcgcgagcggccatttctgggggccggcggtgcgcacgcagtacctgctgcattatgtgatctcgggccgcggcacgtatgcggtcggcggcgagacgtatacgccgcatgcgggcacctgctttctgatccgccccggagagcgcacggtgtacacggcggaccgggaggacccgtgggagtacatgtgggtcgcgttcgacggcttcgacgtactcgagatcctgcggcgcaccggccttgtgagccggtatgtcgtcccggtggaaaacggcggggaattcgagcgctacctgcgcgagatgatcgaggaattcagcggcggcagcctgtttaaggtgatgagctgcttttacggcgcgatgtccgtgctggagaaatcggcgcacggcggcgcctatacgcgcgagcacgagtatgtgaacaaggcggtcggctacatcaagagcaattacggctacccgattcaggtcagcgacctcgcccggtacatcggcatcgaccgcacgtacctttaccgcatcttctttgcctcggaaaacatgtcgccgaagcagtatctgatgcaggtgcgcattaacgccgccaagaagatgctcctgagcggtgcgtacaccgtgggcgaaacggcgatttcctgcggcttttcggacgcctcctcgttttgcagccgattcaagcgctgcaccggcatgacacccaaggcgtttattgcagacaatgaaagacaccgcgcagagggctgaccctgcgcggtgtccttttgtttttaccggctgaactcggagagctccagcccttcgttgtgctcgagcgcccagcggatgctccactcgtttgcaaagagcagcaggtagcgcccgcggatatcctgcactttcttcgtgtcggaggtgagattcagctttttcaggtcgacgtccggcgtgtcgatccagcggatgtgcgagtaggggaggttttccatgcggatctcgacattgtactcgttttccatgcggtacttgaacacgtcgaactgcagcgtgccgacaacgccgacgatgacctcctccatgccggaggcgatctcctgaaagatctggattgcgccctcctgcgcgatctgcgtcgtgcccttgacgaactgcttgcgcttcattgtgtccttctgctgcacgcggcagaaatactcgggcgcgaaggttgggatgccctcgaactgcacctttttgccggtgcagatcgtgtcgccgatcgagaagatgccggggtcgaatacgccgatgatgtcgccggcgtaggcctcgtcgataatctcacgactctgcgccatcatctgctgcggctgggcgagcttgatcttgcggccgccctgcacgtggctgacctccatgcccttttcaaaccgcccgctgcaaatgcgcatgaacgcgatacggtcgcggtgcgccttgttcatgttggcctgaatcttaaagacgaaggccgaaaaatccttgctgaacgggtcgatcgtgccgtcctttgtctcgcgcggcagcggcgccgtcgtcatgtgcaggaagctctcgaggaacggctccacgccgaaattcgtgagcgccgagccgaagaacacgggcgagagcttgccgtggcgcaccttttcgaggtcgaattcatagccggcgccgtcgagcagctccacgtcgtcgcgcagcgtattgtacaggttctcgccgaggatcccctcgagcgacgtgtcgttcaggtcgatctcgtgcgctttgacctcgtgctggccgcgcagctccttgtcgccctcgaaggcgatgatctcggacttctcgcggtcgtaaacgcccctgaagtcgatgccggaaccgattggccagttcatcgggtaggtgccgatgccgagctccttctcgatctcgtcgagcaggtcgtaaggactctgcgcgtcgcggtccatcttgttgatgaaggtgaaaatcgggatgtcgcgcatgacgcagaccttgaagagcttgcgcgtctgcggctcaacgccctttgcggcgtcgatgaccatgacggcagaatcggccgccatcagcgtgcggtaggtgtcctcggagaagtcctgatggcccggggtatcgagaatattgatgcagtagccctcgtactggaactgcatgacggaggaggtgacggaaatgccgcgctgcttttcgatctccatccagtcggaaaccgcgtggcgcgcgttctttttgcccttgacggcgccggcgagctgaatggcgccgccgtacaggaggaatttttccgtaagcgtcgttttgccggcgtccggatgcgaaatgatcgcaaaggtgcggcgtttttcgatctcttttctcaaatctggcaaagtgatgacctctgtttctatgtgaattcgaacaatcggtttattctatcatatatgcgggaaaagttcaagttttccgagccatggagcgacaaaatatttgcggcgggtatggtactgtaaaagaaaaaaacgaggaaggatgtaaaaatgctcaagaagatttccacggttctgctcagccttctgatcgccgtattcgccgcgtttcaggcgcagggtgccgagacaaagccggaaaagtacgccgtgcaggttcttccgaaggaggatgtggcggtttcctccggtgagcgcgtcggcggggagatccgcatcacggcggctctgcgcgaaatggcggtgcaggaggacgccaccataaagtttgttctgaccggcgaccgttatacataccgcaccacggtcgtcgtgacgccggagaacgaggatgaggaggggctgctttcggcctcggcgtgctttgaaaatctgctcagcggcagctaccgactgcaaattgagcaggccgacggcgctgcgctcgattacattctggcggaaaagggcggggaatcaaagtacaccatgcaggaggattccatcacgttctatctctcggaggatgcgaacacgggaagcgcgtggttcatgctgaaggaacaggcgacggaggctgcggacgaggaggcggcgcgatgaaggtgcagcgcatccacaggggacggcactaccgcaggcgctttccggcgctcgcggtgcggcgcattctgctgcacctgctggactggacagccatgcgcttcgggcggcacgggcggcttgtcatgcggctgcgggccaatttgaacagagggcgcatataggcgcatatactataggagaatcgaatccgtgagggggcgttctcaaatatgcgcaggggatttttggcgctgctcgccgcgctctgccttttgctgccggtttcggcacaggcggccggcggcgtgctggtgctcgggggcggtgcgggagacgtgcggctggaaattaaaaacgacgcggcgtatccggtctatgtgctggcgcgggctgaggaggctgaagcgggggcggtatcgctcgccgtccggcagggcggccggagcgcgccggtcttttcgggagacgccgcggcgctttcaggggcggagctgctgctctgcacgctggagccgcacgagagcgcggcggttgtggcgagttccggcggaggcggcgtttccctgcacctttccgagcggcaggcggcggacgccgtgcagccggattacggccggctcatcctctggagctgcatctggatggcgctcgtgatcctcggttcgtacgtcacgatcgcggtttcaaaccgaaaaaagcggggaaagcaggaagagaacagataaaaaacggggaatcgcggccggaaagccacggttccccgttttgtttcacaatatggcggtcagaagcagaaataaccgatcaacgcaatggcaaagccgagcgccgcaccgcagacgacctcgatcatccggtggccgagcgattcgttcagcttcgggatcatctcgttgagctgcgtttcgtcctttgcgttctcgtcggcgaggtattccacaatgtaattgatcgccttggcgtgcaggccggccgcccagcgcacgccggtcgcgtcgtacatgacgatcagcgccagaataaaggccatggcgaagatcggggaatcgaagccgtagagcaggtaggagagcagaagcacggagcaggtcaccgccgagtgcgagctcggcatgccgcctgcgccggcgagacgctcccgcttgaattcaccctttgtgaacaggtgaatggccgtcttgagcagctgcgcggcgacccaggatacaacgccgacattgatcagcgggtttgaaatcaaaatggaaaaatcaaaattcatgcttccagtctcttttcggtgaaattgcaaagtgcctgcgtacggataccggcacacttttccatatcattttaaccgcaaacggccgtcttgtcaattctgccgattcaaaagtaagaaatttgaaatttaccggcggcgcccttgcaggatgcggggcgttgtgctaaaataatggacatgatgaacgtgagaaactacgcgaaggaactggataaaatcgtggaggcgctgcaccgggagaacaggcggccctctctgctgctgcacgcctgctgcgcgccgtgctcgagcgctgtgcttgagcggctgacggcggcgtttgcggtgaccgtgctgttctataacccgaacatcgctccgcaggccgaatacgaaaagcgtgcggcggagctcgagcggctgatctgcgagatgcccgccgcacagggcgtgcagatggtgcgcgccccatatgacccgcgcgaatttttggaggcggtgcgcggatttgagacggtgccggagggcggcgagcgctgctttcgctgctaccgcctgcgcttggaagcggccgcccggtatgccgcggcgcacggcttcgattattttacgacgacgctgtcgatcagtccgctgaaaaacgcggcgaagctcaatgcgatcggcgaggcgctcggggcgcagtacggcgtggcgcatctgcccgccgattttaaaaagaaagagggctacaagcgctccatcgtgctttcgcgggaatacagtctttacaggcaggatttctgcggctgtgtgttttcaaaaagggaaaggatgaaaaaagaggatggcagtcacacataacggtgtaacctaccgggtggcggacgcgcacgcgcacatttacccgggaaaaattgcggagaaggcgacggctaacgtgggccgcttctacggcatcgagatggatgaggtcggcctgccgcatatcctgagcgaggagggcaaggcggccggcatcgaccgctttctcgtctgctcggtcgcgacgaaggtggagcaggtggaatcgatcaacggcttcatcgccgagaagtgcgcgaaatacccgcagtttattgggctcggcgcatggcatcaggatatcacggacatcgagggtgagctcgaccgcattcaggcgctcggcatgcgcggcatcaagctgcaccccgatttccagcgcttcaacatcgacgaggcgggcatgctcgaggtgtatgccgcctgcatgcgccgcggtatggtggtgctgttccacaccggcgacgaccgcacggatttctcctcgccgcgccgccttgcgcgcgtgctggagaagctgcctgatttcgtgtgcatcgccgcgcatctcggcggctaccgcgaatgggcggatgcgcgcgccgttttgcagggcacgaacgtgtatatcgacacgagcagctcgctctttgcggtcagcgcggaggatgcgcgccggagcatcgcgcatttcggcgtcgataagacgctgtttggcacggatttcccgatgtggacgccgaaggaggagctggagcgcttctttgcgctcggctacggcgaggcggagaaccgcaagatgctgtacgataattttgcgcggctcttttcgctgtaggataaaggtacgaaggggcagacctgcgcttgcgcgggcctgtccctttttgacggggcggcgcaacgcacagttgcttgcgctgctttccagcttttgctagaatggaagaaaactatgggaggcatgtgaagtggaaaccaaggaagtgcttcaaaagctgcgccgcgggcgcggctggtcgcaggacgagctggcggagaaggtgttcgtgacgcggcaggcggtgtcgcgctgggaaacgggggagacggtgccgaacatcgaatcgctccggctgctttcggcgctgtttggcgtctcgatcaatacgctgctcgggtcgccgcagaagctgtactgccagtgctgcggaatgccgctcgaggatgaagtgatgagccgggagccggacggcaccatcaacgaggaatactgcaagtggtgttatgcggacggaaagtttgcctatgcgtcgctcgaggcgctgatcgactatcttgtgcccgccatagcgggcccgcagtggagtgaggcgcaggtgcgcgccaatttagaggaaatgcttccgagactccggcactggcaggcgccgcgggcggatgcaccggaaaattgtgcaaagaagaaataaataattcgtcaatacgacgatattcagcaaaacagcacagattcgttgacgcttaatgatttttttgctatactaaatacgaaaagtttctttttttacacaaagggagggtgtattttcgtatggcaggaaaaatctctgcttttttcggcgcacaggatatgaccgccggaaacccgaccagcaacctgatccgattttcggtgccgctgctcatcggcaatctcgcccagcagctttacagcacggtggattccatcgtggtggggcagtatgtcggcgacggcgcgctggcggcgatcggtgccagcggcccgattctcaacctgctgcttgtgctgttcatgggcgtttcggtcggcgcgagcatcatggtctcgcagtatttcggcgcaaaggacaaagagcggctctccgattccgttggcaccgcgatcacggcgaccatcgtgtcgtccgtattcatcatggttgtgggcccgctgatcaccggctgggcgatgtcgttgctgcaaacgccggaggacatctacgtgatggcgtgcgaatacctcgtgatcctgtttctgggcatcatcggcagcgcgttctacaacattctttccggcattctgcgcggcttgggcgattccgtgatgccgctgatttttctcgtgatcgcgtgcggcttgaatattgttttggatatttggtttgtcgcttcctttcacatgggcgttgcgggcgccgcgtgggcgacgattatctcgcaggctgtttccggcatactgtgcctgatccgtctgcttttgatgcgcgacgtgctgcatgtgcggctgcgctcgctctggccgagcagggcgcttttgtcgcagcttgtccgcctcggcctgcccagcggcctgacgcaggcgatcttttccatggcgatgatcgtcgtgcagtctctgacgaacagcttcggcaccacgattatcgcggtttccacggttgtcatgcgtgtggacggctttgcgatgatgccgaacttcaccttcggcacggcgatgacgacgttcacaggccaaaatatcggcgcaaaacagcttgagcgcgtggagaaaggcacgaaatccggcatgaagatcggcattgcggtttctgcgattctggtggtgctgattctgctgttcgggcgtttcctcgtcgagatgttcacgacgacgcccgatgtgattcggctgagcgtacatatgatgcggatcctcgcggtcggctatgtggcgatggcggtcacgcagatcctttccggcgttatgcgcggcgccggcgacacgatgacgccgatgtggatttccatgatcacgacgatcatcatccgcgtgccgatcgcgtacggtctcgccgcgctgatgcagtctccggacgcgctgtttatctcgatgctcacgagctgggtgatgggcgcggtgctcacggtgatcgcctaccgcatgggccgctggaagaagaaatcgattatcgggtcggcgtcagcctgatgtgctttgacagagggcgaaagccgagacggaaaatgcgcttaaaaagccatagccgttctaaaatggggagggagccgctttggtgcgcgccctccccattttgtgttgaagaggagaatcgaaatggaatttcgaagattgaagggcgctgagcttgaaaaaatcctgcaaataaatgtgaactttcgaagtggctttgcagaccgcggagcagcgcggcgctttctggaaacggagcactgctggctttatgcggctctgcgggaggatgctgttataggttttgcctacggctatgtgctttcgcgtttggacggtaaagccgatatgctttatatccacgaggtgggggtggctgagccggagcagaggcgcggcgtgggctctgccatgctgacggcgctgctccgggacgcggggcgatcgggaatcggccgcgtatttctctttgcagacaggcataacgcggcagcaaacgcgctgtaccggaagctcggcggcacggtggggtgggattccggcggtgacgatacggtttatttcttcacgccggatgacgctgcaacgcgctttgaacggaaaaaacgggaataatttgaattttagcttgataatccaaggcattgtgtagtatgataatctataacacaagtttgcggccgcggcgcgccgtttcaccgcggccgtaaagaaaggaaaggtcatacgtatgaaaagaacagaaattatggccctgtacaaatcgcccgaaaccttcaaggatacttcggtcacggtttgcggctgggcgagatcgatccgcgattcaaaagcgctcgggtttatcgatctgaatgacggcagctgcttcaagggcattcaggtcgttttcacggctgaaaatatcgagaattacagggagatcgcggcacagaacgttggggccgcgctgcgtgtgaccggcacgttcatcctcacgcccgaagcgaagcagccgtttgagctgcaggcggcggagatcgttgtggagggcgcctcctcgccggaatacccgctgcagaagaagcgccacaccgttgagtatctgcgcacggtcgcgcatctgcgcccgcgcaccaacctgttcaacgcggcgttccgcgtgcgctccgcggcggcctatgcgatccacaagttcttcaacgaaaacggttttgtctacgcgcacacgccgatcatcaccggcagcgactgcgagggcgcgggcgagatgttccagatcacgacgctcgacatggagaatccgccgcgcacggaggacggtgcggtcgattacagcaaggactttttctcgaagcagacctcgctgacggtttccggccagctcgaggcggagtgtatggcgatggctttcggcaaggtatacaccttcggcccgaccttccgcgccgagcgctcgttcacgccgcgccacgccggcgagttctggatggtggaaccggagatcgcgtttgccgacctcaacgacgacatggatctgatggaagccatgatcaagtacatcatccgcgacgtgatggagcgctgcccgcaggacatcgatttcttcaaccagttcgtggataagggcctcaaggagcgcctcgggcacgtcgccggctccgattttgtccgtatctcctataccgacgcggtcgcgctgcttgaaaagaataacgacgcgttcgagtacaaggtttcgtggggctgcgatctgcagaccgagcacgagcgctacctcaccgaaaagcagttcggcaagccggtgttcgtcaccgattacccgaaggaaatcaaggcgttctacatgcgcctcaacgacgacggcaagaccgtcgcggcgaccgacctgctcgtgccgggcatcggcgagctctgcggcgcgagccagagagaggagcgctacgatgtgctgctcagccgcatccgcgaactcggcctcaacgaggaggactactggtggtatctcgacctgcgccgtttcggcggcaacaagcacgcgggcttcggcctcggctttgagcgcatggtgatgtacctcaccggcatcgcgaatatccgcgacgtgctgccgttcccgcgcaccacgggttcggcggaattctgatctcacgggtttccggcagattttacggaaaaggcgctttcttggcgcttcaatagtgcaaaacaagaaaaatgcaggatttttaaataagtcttgcattttttttgcatttgtattacaatgataaaggttttgacgcataattgcatagctgtttctttggatgatgcaaattttaactttatggagatggtttgatggcatacgcagatctgagccgcgcacagctcaacgaggtcctttccgacctgaccgcgcagtatgaggcattgaaagcgaaggatctttctttgaatatggcgcgcggcaagccgagcgccgcacagctcgagcttgcgctcggcgttctcgaggcgctcaaggcgagaagtgagtttgcaaattccaacggcgacgactgccgcaactacggcgtttgggacggtctgccggagatgaaaaagatcttttctgatatgatcggcgttccagcgtcacagatcatcctcggcaataactccagcctcaacatgatgttcgaggtgatttcccgcggctacacgcacggctacaacggctgcacgccgtggtgccgcctcgataagatcaaattcctctgtccggtgccgggctatgaccgccatttcggcatcacggaatactatggcttcgagatgatcaatatcccgatgtacgcgaccggcccggatatggatctcgtcgaaaagctcgtcgtcgaggacgattcgatcaagggcatctggtgtgtgccgaagtattcgaacccgaccggcattacatactcggacgagacggtccgccgctttgcggcgctgcgtccggcggcgaaggatttcaagatcatgtgggacaacgcgtactgcgtccacgagctcaccgatacgccggatacgcttttgaacctctacgagctctgcgtcgaaaacggcacgaaggatcaggtgatgatcttcgcctccacctcgaagatctccttcccgggtgcgggcgttgcggcgctcgcgacgagcgacaacaacatcaaggatttcaaagtgcatacgctcacgcagacgatcggccccgacaagctgaaccagcttcgccatgtgctgtttctgcacgacatcaacggcgtgcgcgccctgatgaaaggccaccgcgcgattttagagccgaaattcaagctgtgcgagctgatgctcgaggagagcctcggcgatctcggcatcgcggagtggaacaagccgaacggcggctacttcatcagcgtcgacgtgctgggcggctgcgcaaagcgcgtggtgcagctctgtaaggaagcgggcgttgtgctgacggacgctggcgcaacgtacccctacggcaaggacccgcacgacagcaacatccgtctcgcgccgtccttcccgccgctcgaggaactcgagcaggccatggaggttttctgtgcggcgatcaagctggctgctgcggaaaagctgcttgcgcagacagaggtataatcgatccaacacgaaaggcagggccttattttgaggcgcctgccttttttgcatgcagtattccggcatttgtcaaaagctcgagcaggaaaaagaagatgccgacataggggatcagccagaaatttccgctgacaaggctgcagtacaccgcgaaaagcatggcggctgccggcgtgcgcgtcaccttggagacgagccgcggctcaatgatctgccggatcaccgtcagcaggatccagccgatgaacagccctgccgcgcgcaggaaattgccgcagaggagttggtagaggcagatcggcagcagcacggtgccggggccgaggatcgggaaaatatcggagacggtcacgacaagcgccgtaatcagtggatattttatgcgcagcaggtacaggatgataaaggattcgcagaaggtgatcgcatagatcaaaaagtatgaaaaggcgaagcccgccgaggtgcgggagagtccgcggatctcccggcgcaggcgcagcgtgcgctgtggaccgagccagtaagcggcaaggcgcggcaggcccgcgcggtgctgcaaaaaaaggcaggcggcgacggggatcagcgcgagcatcagcagcagcgccgggatcgagaggaaaagccggagcatgccgccgaccgcgggcaggacagcgcccatgttttcggaaagcgagtcggaaagccgctcggtgagcgcagggatcgaagcggccgcgcgctcgatgacgccgcgcacggcgggggcgagtgcctcgtattcaaagtagccgctgcccgcaaaaaagacgatcagctcgcggcagagccagtagagcaaaagccccgcgccgaggagaaaaagcaggtaggcggccaccgccgcgcacacggcggcgcgcccgcgcggcatgcggagcttattctcaagaaaagcgcaggcgggctttgcgaccgcgccgagcgcgatgccgagcacgatgggcagggaaaaggaaagcgtatggacaaagagaataaaaacggctgtatatgcgagaaaaaacagaatgtacggcgcgttgtcccgccaaagtgcccgtatgcgtttcaaaggctcacccccgttcaaattcagtatgcgcggcgcagcggcagaaatgcgaaaaaatcttttgccgcgcgtgtgtttggggtgaaaggaggtggcctgatggtgatggaggagagcggctgcggcgcggagctcgagcagctcgtcgagcggtatacggacacgctgtttcggatcagctattcgatgtgcggcgtcgtggcggacgctctccgggcgcatccggatcgaatggagaagcggcggcttccgcgcgtcgtttgagaccgacggctgacggaataaaaattttatccgcctgatgacaacgttgtctttttgtgctacaatggggataacacagtacaaacggaaaggaaaatgcaaaatggaactgctcgtcgaaaaacgttatctgaaaatccccgtgcggtttgacggggaaccccgccggttcaccgtctccgaaaacggcgcgccggtctatgaatttgacgcggcctatacggccaatgcgccggacgccgaatactgcgcggatctgcgcgattacgcggggcgcaccgtgacgctcgatgcgccggagggctttgtgccggtgctgtgcgacgcgcccgtacccctcaccgccgcgcaggaggcgctgcgcccggccgtgcattttacggcggaacgcggctggatcaacgacccgaacggcctgtgcttctacgatggcctgtatcacctcttttaccagcataacccttacggccgccaatggggcaatatgcactggggccatgccgtcagccgcgacctgctccattgggagcaccgcgaagaggcgatgttcagcgacatgcacggcgcgatgttttccggctgcgccgtggtggaccgtgaaaatatcgccggactcaagcagggagacgagacgccgctgctgttcttctacacctgcgcgggcaagcgcagcacgcagtgcctcgcctacagtgtagacggcggcgaaacgctcgtcaaatatgggggaaacccgctgctgccggagcttgtcggcgggaaccgcgacccaaaggtcatattcgacgctgagcgcggccgctggctgatggcgctctactttgatgggcggaactatggccttttcacctcgaaagatctcctgcactggaccttactgcagcgcttcgacctgcccggcgacgacgagtgccccgatttctacccgctgacggcggacgacggccgcacgctctgggtgtactcgggcgcgcacgatatgtactacgtcggcacgttcgacgaaaaggggctttaccagccgattcaggcggtcggtcagctctcctattcctcggcggcctacgcggcgcagacgtattaccgggaggcgggcggccctgtgatccgtatcgcgtggaaccgcagcgaggtgcccggcgcgccgttcaacggctcgatgtgcacgccgacggagatgacgctgcgcaaaatcggcggacggtactacctgtgcgcgaagccgattgccggcgtggatgcgctggtcacaaaagaggttcggaaaacagccgagacgatgcagaattacgtgcagccgctcgaagccaaagcgtgccggattacctttacagtgaaggacgtaccgttttcctgtaaagtgtatgggcttgacattcgcgtggaggccggcgggatctcctgcaaggacgccttcctgccgcgcacggaggaggagacgatggagatacagatccttgccgacacgacgagcacggaaatctacctgaacggcacggcgatcacagcggtgccgcacgtggcggatgcagcgcaggcggtgtttgagctgcacgcggatgcgcccgtccgcttcgagcgcttctgcgtttcggaactctcgctttaaaaataagatagggtgcgcctgtgcggcgcaggagctccaatataaatttgccggacaagggaatcgccttgtccggcattttgtgttctaaacgggggtgcccgtccatagaatgaaccatacggaaaaggattggtgatggatatggactttgaaaaggcagtgtgccaccttggccgctttgcgccgctcctgaaaaaggtgccgcggggcgtccgcgacacggtgttcgacgtgcggctcagcgtaaacaggccggtcatgctctgctgccgcggacgcatcctgtttctgcgggaggacggcgcggtttcggcccacgcctcggcggactgcacgcgggtgacgccggcggatatggaggagatctttctgcggctgtgcggctactcggtgtacagccatatggatgaaattcgcaatgggtttatctcggtgggccgcagcctgcgcgtcggcatcggcggcacggctgtgctcaaaaacggagagctgaaaacaatccgcgacgtaacgagcctttccgtgcgcattccccgggaaatacgcggctgtgcggagcatctgctacgcgcgggcgtccccttgcaggacggcctgctgctcgccggcgcgccgtcctcgggcaaaacgacgctgctgcgcgacctcgcgcgggtgctcggcgcggcggggcaccgcaccgtcgttctggacgagcggttcgagcttctggcggacggcttcgacctcggcgcgtgcaccgacgttttgcaggggtatccgaagcgggaggggctcgcgcacgcggtccgctgtctttcgccggaatacatcctgtgcgacgagctcggcgaggacgatttccctgctgtaaaggcggcggcctttgcaggtgtttcgctgatcgcgaccgtgcatgccggcagtgccggcgagctttgcagccgcgccctgtgccggcggctgctcgagctcggggcatttcgcacggccgcattgctcggcggcaggcagaacccggccgtttgcacacaaatccttcgggcaggtgatcttcttgaaaacagcggcggcaatactcctcgtggtctgcggcctgagcgccgggctgtctgaatcgatgcggctcaaggcgcgggagcgggagctctgggtcttttccgacgcgctcgccgccctgaaaagcgcggcggcttatacggcgggggacctgtacgccctcttggcgctgtgccgggagaatgcgtttctgcgccgcgtccgctgcgacggcgatctgcacgatgcgtgggcggccgccgcccgggattttttcacacggcaggccgaccgcgacctcgcgctcgcgtttctggacggctacggcaggaccgacctcgaggggcagctcgcgtacatctcgctttttgaagcgcgcacggcgcaggcgctcgaggcggcgcgccgggacgtttcgagcaaaagccggctgtatacgatgctcggcttcttttccggcacggtgacggcgctgatcctgatttgaaaacagaaaggaacgtaaagctgctatggatgtggatctgatttttaaaattgccgccatcggcatcattgtcgccgtgctgaaccagcttttgatccgctcggggcgcgaggagcaggccatgatgacgacgctcgccggcctgatcgtcgtgctgatgatgattatctccgagatcagcacgctgttcgacacgatcaagtcggtattcgggctgtgagcggcgtgctcgccgtgtccgcgctggcggttttcgccgcggtgtgcggcgcgctgattaaaaagggcaatcccgaaatcgcgcttctgttttcgattggtgcggcggtgctcgtttttctgtacgtcctgccgcagaccgagcagctcgcggagacaatcggcgcgctggcggaagcctccgaaatgtccgaggcgctcggtgtgctgctcaaggcgctcggcatcgtcctcgtcgggcgcgtcgccgtcggcgtctgccgcgacgcgggcgagagcgcgctcgcttccggcgtggaatttgccgtaaaggccgccgtactgctcacggctctgccacttttgcagggcctgctcgctatcgtgcaggaagttttaacgctatgaaaagaattttaacaatctgcttttttctgctggcggcggtgtggctctgcgccgcgccggtatgcgccgaggcggtgcaggaagatatttatgcggacagcggcgccgaccgtctcgaggaggcgctgcccgaagaggcgcgcttccttctgcgcgaatccggcttttcgccgcaggcggacgggcagggcgacgcaggggatttcctcgccgcgctcgccgccggcgtgcgggaatcgctgacggagccgctgcgcgcgctcgtgctgctgctcgcggccgtcgtgctctgccggatcgtctccgaccttgcgtcgggcgcactgaacgagacggtcgggctgtgcgcggcactcggcgcggcgggcgtcctgcttccgccgatggccgggctcatcggcaaaacggcctcggtcacagaggcgatcggcgcttttctgctcgccgccgtaccggtgtacgccggcctgcttatcacggccggcaacgccgtgaccggctccacctacggcgcgctgacgctgacggcggcaaacggcgtttcggcgctgaccgtcaacctgttcgtgccgctgctgcgcgtgtttctggcgctttccgcggtctcttccgtcacgtcgttcgacctgaaaaagctgacggacgcgctctataagctcctgaaatgggcgctggtgctcgccgtcaccgtgttcaccggggttctctcgatgcagacgctcgtttccgcgcagtccgatgcggtgaccggcaaggcggcgaagatgattgcctcgagcgcgatcccgatcgtcggcggcgcattcggcgatgcgttctccgtgctcggcgcgagcatcggcatggtgaaatcgggcgtcggggcgttcggcatcctcgcttctctggcaatttttttgccgctttgtctggaggcggcggtctggctcggcgtgtgctttttgtcgtcgctagcggcggagctgttcgggctttcgaagctcgcttcgtttctggacggctgcgcgacggcgcttcggcttcttctggcggttgttttcagtatcggtgcggtctccgtcgtttcggcggcggtcgtgctctgtgtgcgaggtgcttatgcgtgaggtctatacattggtgctttctgtcagcgcggtgctgctcggtgccgagctgctggcccgcttgttcccggaaaaaagcggtgcgctggtgcatgcgctcgcggtgctggccatcgtgctcgcgctcgtcggcggccttctgcacctcgattttgactgggccgcggcaggctccggctttgctgcggagcaggcggcagaggcgccgggctcgctttacgccgaaacggggacggcgctgctgcgggagcggctctgtgcgctgctggaggccgccggcgtcgaggtttccggcggtgcacagggcgtggaggtctggtacacacaggaggatgacgggacgatcgagatcgaccgcgtgcgggtgcgcgtggcatatggcacggacacagaccgcgcttacgcgcttttgaacagcgcgctgaccgaggcaatcccggtggaggtctatgcggaataacgcggaaaggagtagaaaatgcaggaaaaatacagggcgctgctgaaaagcgggaagctcacctatcttttgatcgccgtctgtgtgattgcggccgcagccgtggttttcatgccggagaaaaaggcggaggtgaccgtgccggaaaccgccgaaacggaggtcacggccgaagcgtacagcgcggcggtctccgccgaggtcgcgcagatggtctcggcgatcacgggcgaagcggacccgcacgtcacggtgacgctgaattcgatgggcgagactgtttacgcgacggaagaccgccagagcgagcgcaacgcgcgggaatataccggcgacgcgctcaataagacgcagacggacggcgacaccgagacgacgtacatcattgtcaaaggggcggacggcgagcagaagccgctggttgtcacgcagacacagccggagatccgcggcgtcgtcatcgtcagccggcggggcggcgacgcgcagatccgcgaaaaaattacggaggccgtgaaaactgcgctcgatttatcctccacacaggtatgtgtgacggggtattcggaatatacatgatacaaatcacgatcggaggacaaagctatgaaatacggaaaaagacagctcattctggcatccctcgtactggcgctcggcgcggcggtatacctaaactggcagtttgccggcactggtgtggcggtggacggcgagagcagctcggagacctcgagcgcactcggcgcggcgcagctcgtcaacaacaattatgtggagaccgtctccgacggtgttgagagcgcttccggcgaggtatccgggcaggaggcggagccgacgcagggcgaggtctccgaggcggcggagaagctctccgacgcgcgcatgacgcgccagacggcccgcgacgaggcggcggagaagctctccgacgcgcgcatgacgcgccagacggcccgcgacgaggcggtggagctgctcgaggacattctgaacgacgccgaatcggattccgccgtgaaggaggccgcagtcagcgaggcctctgccatcgcgcagaatatcttaaaggagacaaatattgagagccttgtcgcagcgaagggcttttcggaatgcgttgcctacatcaacggcgatacctgcacgatcgtcgtgaacggcgatatggaggacgcgcagaacgcgctgatcgtccgcgacatcgccgcgacggagaccggcttcagcgccgaccagatcaaaatcatttccgccgcctgatttcgcctttgccttgctttttccgccgcgctgtgctacaatacaaccagtacaacggcgtgttgggtgaagcttgaaaattccagatcgatccggccacggccggtgtttccgctcagactgcccgccgtttcaaacacggcgggttctttttattttgcacagccgcaaggaaaggaaatgaatatgaaaacaaggcatgaatcgagggagcaggcgttcgtcctgctgtttgaaaagaccgtgaacgacgatccgatggaggacatcgtcgagatggcggtcgaggcgcgcggcatcgagatggacgcgtactgcgaaaagctgaccgcgcttgcagagctttacctcgagcagatcgacgcggtaatcggggaaaacctgcgcggctggagcctgcgccgcctttcgcgcatgacgctcacgatcctgcgcgtcgcggtctgcgagatgaagtttatgaacgcgccggatgtgccggtcagcgtttcgatcaacgaggcggtcgaactcgcgaaggtttacggcaacgaaaaggacgcatcctatgtaaacggcgtgctttcgagcattgcgaagtcgatggacggggcggcgcagaatgcctgagacggtttcgctcggcttggatacgagcaattacacgacgagcgcggcgctgctgcaaaacagtgaaatacacagccgcggcaggctgctgcccgtaaaggccggggaaatcggcctgcgccagagtgacgcggttttccaccacacgcgccagctcccgcaggttgtggcagagctcggcggcgcggtgcaggacgtgcgcgtgatcggcgtttcagaccgcccgcgcgacgcggaggattcctatatgccgtgctttctcgtcggcctcggcgcggcggaaatgctggggcaggcgctcggtgcgcccgtgcaccgcttttcgcaccagcaggggcacattgcggcggcgctctattcggcggggcggctggcgcttctggagcggccgttcatcgcgttccacctctccggcggcacgaccgaggcggttctcgccgagccggagcgttccgggaaaattttcacaacgcggcttgccgcacgctcgctcgacctaaaggccgggcaggtgatcgaccgcgtcggcgtgctgctcggcctgccgtttccggcggggcggcaccttgacccgctggcctgcgcctgcggggagaagatcaaggcgcgcgcctcgatgaagggggcggactgctcgctttccggtgtggaaaacaagtgccgcgcgctcgcggaaagcggcgcgccgcgggagacggtcgccgccgtctgcatggcgcatgtgatcgccgcggtcgatgcgatgtgcgcggcgctcagggcgcagtacggcgatttgccggtgctgttttccggcggtgtgtcctctaactcgatgctgcgcgcgcagatggccgaaaaatacggcgccgttttcggcgagccgcgcttttccgccgacaatgcggcggggcccgccgtgctggctgcactcagagaggagggcttcggatgcgcgttttgactatcagccagatcaatgtctttttgaaatccctgatcgagggggacggccgcctgacggatatttacgccgccggtgagatctcgaatttcaccgaccactaccgctccggccacctgtatttttcgctgaaggatgaaaaatcggtgctcaaggccgtgatgttctcgagtgccgcgcgccgcctgcggtttaagcccggcgacgggatgcgtgtgatcgtgcgcgggcgcgtctcggtttacgagccgagcggccagtatcagttctatgtggaggagatgcagccggacggtctcggcgcgctgaacctcgctttcgagcagatgaaggcgaagcttgaagcggaggggctgttccgcgcggaatttaagaagccgatcccgcgctttccgatgcgcatcggcgtcatcacttcgccgaccggcgcggcggtgcaggatatgcgggatatcctcgcgcgccgctggcccgcggcggagcttattttctgcccggtgctcgtgcagggcgagggcgcgccggcgcagctcacggcggcggtgcgggagatgaaccgccggcgctgtgcggatgtgattttgatcggccgcggaggcggctccgcggaggatctcgcggcgttcaacgacgaggcgctggcccgcgctgtctttgcctcggagattccggtgatctccgcagtcggccacgaaacagatttcacgatctgtgattttgtcgctgatctgcgcgcgccgacgccgagtgccgcggcggagcttgcggtgccggaccgcgccgagattgccctgcaggcgcaggggcttgtgcggcgcatgagaagcgctgtgcagagcggcctcgacgaccgccgccagctgctcgacacggcctgcgccgctgccgtgctccgcagcccggcggcgctgctcggcacccggaaaatgcagcttgacggcgcggtgcaggcgctgaaaacgacgcaggagcggttgtggctgcgtgagcgtgagcggctttcgtcgctttccgcgcggcttgacggcatgagcccgctcaaggtcatggcgcgcggctacgccgccctctcggatcaggcgggcaggcccgtgcgcagcgtacgcgatgtatcgccgggcgacggcgtgcgtgcgcggctttcagacggtgcgctggagctcacggtttccggtgcagccgccaaggaggaatgagatgcactgcgtgctggttgcggggccgcccgcttcgggaaaaagcacgcttgcggaagcgctttcgcgggagctgaggcttcccgtgttttttgaggacggcgtgaaagcgctgctgttcgatgcggtcggctttcgcagccgcgcggagaaagtggcgctcggcgcggcacagcgggcatgtgtttgacgaccggtatccggagaaggaaggcggccggactgcggcagccctgctctcctttgagcagtttcgaacggggatatgaacagcttttccgtgggcggccctgtgattgcggtgggtacgacggatatttcggcggttcgcgcggcggagatcgccggtcagatgcgcgcttgcagagcgggcggagacagcgcagaaaggaaggaaaaacgatggcgaagaaaaaaaccagctttgaggaggcgcttctgcgccttaaagagatcacagaaacgctcgagcgcggggacgtgacgctcgaagaatcgatcaaactgttcggcgagggaacggagctttcccggctctgctacgaaacgctgcagacggcggagcagaaaattacggagctgtcagagctcggcgaagcggaggaatcaaaatgaccgatcagattcggaaaatcgagaaggcgctcgactggtttgtgccggaaacagacgcgctctataagacggtgacggacgccatgcgctattcacttttgagcggcggaaagcgcgtgcgcgccgtgctggcgctcgagttctgcaagctgtgcggcggcacggaggaggaagcgatgccgtttgcctgcgccgtcgaaatggtgcacgcctattcgctgatccacgacgacatgccctgcatggacaacgacgacatgcgccgcggcaagcccgcaaaccacaaggttttcggtgaaagtcaggcgctgctcgcgggcgacggccttttgacgaaggcgtttgaaacggcgctgagccccgaggcgttccgcatcgtcggtgcggagcgcgcagcgaaggcggcggccgtactggcgttctgcgccggcgagcgcggcatggtcggcgggcagtgcattgacctcgagaccgagaatcaggtggtcccgctcgacgtgctccgcgtcaaggatacaggcaaaacggcgaacctgatgatggcggcgtgcatgatgggctgcatcgcggccggcgccgacgaggagcgcatcgaagccgcaaaagattatgcgctgcacatcggcctcgcattccagatccgcgacgatattctcgatgtagtcggcagcgccgaagagctcggcaaaaacacgggcatcgacgcgcagaataaccgctgcacatatgtgtctttgctcggcctcgagcgcgcgcaggcgcttgtcggcgagcacacgcagtccgcgctcgacgcgctcggcgttttcggcggcgattccgcgtttctccaagattttgccgtacagctcgcgacgcgcagcaaatgacgcggacgctgacgttcacgatcgccgcggaggacgccgggcacgatctccggtacttcgtgcgccggcgcctcggcctttcggcgcgcgtgctgaccgcgctgaaatacgagggggagatgcgcctgaatggcaggcacgcccgcagcgtggacgtgctttccgccggggacgccgtggcgctcgtgctgtttgacgcgccgggggattatgagccgattgcactgccgctcactgtgctgtgggagaacgaggattttctcgtggccgataagcccgccggcatgccggtgcacccctcgccggggcacgaccgcgacagcctgctccacgcggcggcgtggtacttccgcggtgtgccggacttcgtttttcgcccgctctaccggctggactgcgatacaacgggggcgatcgtcctcgcgaaaaataagtttgcggccggcgcggtgcttgaaaaaacgtacatggcggtctgcgaggggacgccgccggaaagcggtgtgatcgaccttgcgatcggcctgaagccggggcacacggtcgagcgctgtaccggcatcggcgcgcgtgcggtgacggcctatcggcgtatagcggcggacggcgcgcacagcctcatggcgtttcggctcgagacgggccgcacgcaccagatccgcgtgcacatggcgggcatcgggcacccggttgtgggcgacgacctctacggcggaaaaacggaccggacaaaccgccagcttctgcgctgcacgtcggtgcgcatcgtctgcccggtactgaacacagacaaaaccgtggcggcggatttcaccccggcgcagaagcggctttttccggcattgtttaatgtggagagggaaaaataaaaatcacccagccgccgtgtgggcggaagccgggtgattttggctactgcatatcggtttggatcaggcggtcgagcagggagatcagcgtcaggcgctcgtcgtcgctgaggctgcgcgtgatgctgcggctccactcctgcaaatagccgcgaatgacgggcgcgagctcttcgcccgcctccgtcaggtagaggttgttctcgcggcggtccgttttgccggtttcgcggcggatgtagccgagctcctcgagccgcttcgtgcgccgcgccacattgcacttatcgatgtacatgtgcgagacgatcgcatcctgcgtcgtgccgggattgcgcgcgatgtagagcaaaatcatgtgcatggcgccgataaagccgtagggcttcagccgctcgcccatgaatttgttgcgctgccggtgcagataggtgatgctccggccgagcaggcgcggaaattcctgcaaggtgtcggccggggagagtttatcggacatagaagctcaccacacaattcaaaatagttgattctgaaactaattatacggcagaagctgccgcaagtcaagctttttcgcgcatgtaggggcggcacacccgcttgtagagcgcgtcgtcgaacatgacgtggtagatgctttcgagctcggtgcgcacggtttcgtctcccggcgccgcggcggcgaccggcatggtcatgatgctgaaatcgacgccgtaaagctcgcactttacgttggtcaccgcacagccattgcgctcgtagaaggcgatgcgccggcggcggagcgttttttcgctctcatcctccgtgctttccacgctctccacctcgagcaggatggcgcagacgtcccgcagctcctcgcgcagcagggggaagaaacggctgccgatgccggtgccgcgcaggccgctcagcacggcgtagtaatcgagcagaatatacggacggtcgtttgttttggagaagtaggcataggccctgagtgcctcgccctcataaaggccgtagcagatgtaattgccgcgcgcgcacagcatctcgatgttcttgtaggggcgcagctcgctctgcgggaaggcctcctgcatgtgcgtgtcgtagatttccttgatttccgtctgattgagtttgcgtacgtacagcatgatttgattcactccgaatttttagattcgagccgcagcaaaggagatttgcattgaacccgtttccgtatgcttttgacaataagcgataccatacattagcctaccacaaccggcagcagaattgcaagacccaaaaagcggttcttgacgcggggctttcctgcccgaatcttgacgggacctgcggtgtgggcggctgtatcttctgcgacggcggcagcggcggtttcacgccggacagccgcctttccctgacggagcagatcgcggccgaaacggcgcgcatccgcagaaagaaccctgaggcggagatcatcgcttattttcaagcgcatacgaatacctacgcgccggtagagacgctgcgccgcctgtaccgcgaggcgctcgacgcggacgtggcggggctttccatcgcgacgcggcccgactgcatcgacgacgcggttctgcgcctgctgcgggagacggccgccgaaaagccgctgaccgtcgagctcggcctacagacaagctgcgatgaaacggcggtgcgcatcaaccgcggttacccgttttccgtgtttgagcgctgctttctgcgcctgcgggcggccgggctgcgcatctgcgtgcacgtgatcgacgggcttccgggcgagggcatgggcgagatgctcgaaacggcggcggcgctcgcgcgcctgcggccggatgcggtgaaaatccacctgctgcacgtgctacgcggcacgccgcttgcggcgcagtatttggagggcgcatacatgccgatgggatttgaggcgtacatcgacgccgtgatccgccagctcgagctgctgccgccggaaaccgtggtcgagcgcatcacgggagacggcgatcggagcaagctgctcgcgccgctctggagccgcgacaagatccgcgtgctcgggacgatcgaccgggaaatggcagagagaaatacatggcagggcagactttattcgccggatggcttgcatctttgacggaaattctgtataatatccgtaaagccccctgaagctgtatgaaatacccaaggaaaggtaaatcgaatcgatatgaaaaatttgtcacggtctacggaaaagaagggcgctgattcctttgcggcgaagcgcacggtgtttctcggcgttgtgattgttctgatcgcggccgtcgtggttctttcgctctattcggcgctcagcggcgcgtttggcggcgcggataactccggtgtggtttcaagcacggaggatggcaagctggtgatcgaggatctctacgacggggagatcacgattccgaaatttgatattgcaaaaaatacgtatgatacggaaaaattccagaacgacaacggccttgtgacgtatgatgatccaaacgcgtcgctcggcatcgatgtgtccgactatcagggcgagattgactggcaggccgttcgggagagcggcatcgaatttgcggtgatccgcgcgggctaccgcggcgctacccgcggttcgctgtacgaggacgagcgctttgaggcgaactatgagggcgcgacgaacgcgggcatcaaagtgggcgtctacttcttctcgcaggcgacctcggtcgcagaggcggaggaggaggccggctatgtgctcaacctgttgcagaataaaaagccggattaccccgtctttttcgactgggagatcgccgacgtggagggctcgcgctccgcatccgcgacgggcgagcagatcacgagcttcgcttcggccttctgcaagaagatcagcaaggccgggtttaaggcgggcgtttatttcaaccgccatctcggctacgactactacaacctcgagacgattaaggactttgatttctggctcgccgaataccagagcgttccggcgttctactacgactttaaggtctggcagtattccgataacgcgcaggtgcagggcatcagcacgccggtcgatatcaacatcagctttaaaaaatatgcgtaaaatccgccgctgtttgggaaagactccaaacggcggcgttttttgctttcagaagaaccggaaattcgcttgtttggtgcctgtcgtgtacggcatgcggcggatggccgcggtgtcagagcggctgcgctttgtctgcgccgaaccagccgcaggccgccatatcgacgcggccgtccggcagaaaggcgacgccttcctcggcgagaagcgcgcgctgcacgtccggcccgccgaaaacgtagccggcgcacagggagccgtccttgaacacgacgcggtggcaggggatgcacaccgggtctggattgcggtgcagtacgaagccgacgccgcgcgcggcccgcggcttgcccgccagaaacgcgatacagccgtaatttgtgaccttgccgcgcgggattttctgcacggcaagatagacattcttggaaaaatcattcatggtgtctccgtcctcccggaaatctgtgggatatagcatcagtatagcacaaaaaacgcctttacaaaagcccatatttcttctataatagagaaaacagaggcgctcattcgcgaaatccgcgcgatgagatgaagcagggaaggcgcggcggtgcatcgaacaagacggacaggcgtggttttactggtttcggcgcgatgcttctggctcttgcacttgccgcgccgctggcgcttgttttcccgaaggggcatgcgcggcggattggaatcggcgttttggcggcctttttctgcttgcaggcgctgggggctttttgtaaaaagcggtgacggcgcagccaaggaacatccggcggcgtccgttcagacgggcttaaattatttgaaatatggaggagcaatcgagtatggcgatcatcgaagttaattttatttcacagtgcctcatgcgcacggtcacgtttaacgcgatcatcccggcggataagtttgggccgcagacggcggcgccgtcgaagccgtttaaaacgctctatctgctgcacggcattttcggcaattacacagactgggtcaacggcacgcgcattcaggcgtgggcggaggcgaacgacctcgccgtcatcatgccctcgggcgaaaaccgtttttatctggacgacgaaaagagcggcgaacagtacggcgaatttattggccgtgagctcgtggaatttacgcgcaggcttttcccgctctccgacaagcgcgaggatacgttcatcgccggcctctccatgggcggctacggtgcgctgcgcaacggcctcaagtatgcggagactttcggctgtgtcgcgggcctttctgccgcgctgatctatgccgggcttgcggattccgacgacagcgcgccggttttcacattccgccggaagtattacgaggcgattttcggcaagctcgacgagatcgtcggcagtgataaggacccgaaggcgctttttgaaaagctgtgcgccgagcgccgcccgcagccgaagctgtacatgtgctgcggcacggaggattctctgctcggtgtgaaccgcgatctgcgtgacgcgctgctcgcgcgcggggcggacctgacatatgaggagggacccggcgggcatgactgggtgttctgggatacgtatatccgccgcatactcgagtggctgccgcttgaggccgcgcaggctggcgtcagcagcggaaacgtgcagtaaggcgccgaaccgtgttttgccgcctgttttgcagagctgacggataggcgggaagattcgcagtatagcaaagaccatttgacagaccgcgcggtgcggtccggcaaatggtctttttgtatcgcgcacggcgtcacggctggatcaggccggagggcttcgggaatttggcgagatttttgacggcgtagcccgcaagccgggtgacgatctgaaagaggaattcgcgcgttttcggatcaagccctgcggcggcgctgcgcatggtgctgaggcgctgcggcaaattcccaccaaaatcgaatatgctggtgatcccgccggcggaaagaatgtcgtacagcgcgtcgacaaaccgctcgcgctccgcaatgctcatgccggcgatccaatcgtccagcgtgtcgttcataaattctgcgcctgcggtgattttttccagcgtgcggaaagcgccgtcctcgatgacccacgaaaacggatcatgctgcatgattccgctctggcggctttccacaacggtgtattggtcgtggctttcgagcagcatgccgatcaaggaggactgcggaatggtcttgcggatgcggggctgtatgcgccggtagcccgcggattccagtaccgcgcggctgaagcccgggctgtcgtgcgcgtaaacggcgtcgatgcgcgcttgaatttcgggcgcgcacatggccgcggcatagatggcgaggttgccgcccttcgagtgcccgcacaggagcaggcggccggggaacgcagcgccgatttgattcgcgtaggccgcggcgtccgcctgcgccggtacgcggggcatgaaggccatgttgaaatcttccttccagccgaccagtgtggagtccgtgccgcgaaaaacgatgcaggccgtgcggtcgtccggataaaaggtgacggcggcaaactgctcctcgcgctgtctgctcgtcttttcggagaagctgccggcccgcatgtttcgaaaccgcgggctggcggcaagtgcggtgagcaggcggcggtttcccgcctcgtcgcggacgccgcggaacaggccctcgaaggcctccgcgcgcaggaagtcccgaatctcgggatcggccgcatgggtgaaaaccgcgtcgagatgaatataggagagctgggacagcacgaggctgtcgacctcggaaaacgggcgctgcgaaaacgtgtgcagcgtttgttccgcgtattcggtgatgcttgccatgaaaggttcctccgttcacgtgccgtgcacgctgcttcgtatgcgcacggctttggatacagccattttatgccgggtgtgggatttattatgaacagaagctgccggatcgcgccgcatctcgtgctgtacggagcggaatctgtggggtgccggcggcatttcggagcgcacgggatagggaaaagcaaaaggcggcatgaccgaagccatgctgccgctctgtatggcacgaagcgctgtttatatggaaaatgccgccggaattacagattttgcagcagggtgatcacgatctgcgcggagttattggcagcggtatcgccgaagttttcataggtgtcgtgcgcggcgccgtccgccttatcggacatcgcgcggatgacgcagcagggaacctcgtactgtgcggcgatgcgggcgaccgccgcgccctccatctcgcaggcaatggcgttgaattcatcctgcaaatacgtgacgtactcgctgctggctacgaactggtcgccggtcgcgatgcggccctgaaacacgtgctcctcgccgagaacggaaacggcagcctcataagccttctggctgagctcttcgtccacgggaatggagccgtcctcattgaagccgctgtcgccgttccagacaaagccgtcgttggtctggctgccgtaatcgtggaataccagatctgtggcgatgacctgatccagaaccttgacctcgtcgccgacgccgccggcaatgccggtgaagatgatcgatttcacgttgaattcattgatcagaacggtggtgccggcagcggccatggccttgccgatgccgccctgaaccagaacgacgtcctgtccctcgagcgtgccgatgctgaaatccacgccgccgatggttttggtctcgctgatttccgtcttttcgagcagcattttcagctcgttggacatggcggtgatgatgccgatcggctggttttcggtgacggcggccgcagacgattcagacgcctcgggtgtttccgcggcagacgatgtggaggccgtggacgatgtggaaggtgcggaagagtccgagggcgcgctgtctgcgccgcaggccgccatggacagtgccagagccgcagacagaacgatggaagcggccagacgcaaagattttttcatggatggaaatcctcctcaaaataatgtgtgcgtgtatggaacacgccaaattctattgtaaagaagattatacagtccgtcaatggattgcagaaatttcggagaatttgccagaaaggataagaaacaggggatttttgaggtgctttcgatagggggtatcgataaaaccaaaacgatcccggccgctccgccgccgtcagctcgcccgttcgcccttgtgggccttctgtcataccggaagcgctgggggtggggtgagcgtcagaaaaagcccggcatacaagtgcagtaaaaggcgtatcgcattttttgctacaggcgcacaatttcccccgagacctctcaacggtttttgccttcatgccttgcggcccgacagccttgaacagcctgcatcacgcggcacttcattttccgcggttcagtggcagaaagcggcgccgcgctcttctaaaggtaggatataaataaatttacgcaggtttgtgaaaattctattattcggtttgctgtattgacaaattcacgcagttattgtaaactaactacgaaatgtgcagtgtgatgaaacatgtaagaccaatttcgtgtattcatacttattgcgctttattttttgcctatagttagtcgtaactaacttaggaaagaagggggtatttatatcaaaggacggactctgactttgctcttggcgctcgccctttttgttctggcagtcatttccatgtttatcggcgttatcgacatcacgccggcggcgctgctctccggcgatatggagcagctcgagatttttctgatttcccgcctgccgcggctgctggccattctctgcaccggtgtggggatgagcgtggccggtctcatcatgcagcagctctgcatgaataaattcgtttcgccgacgactggcgcgacgatctcgtcggcacagctcggtattttactggcgctgctgtttatgccggcttcgaccctctgggggcgcgcgatctttgcttttatcgccgcgattttaggcacatgggtattcgtctggtttatccaacgcatcaaattcaaggatgtcgtaatggtgccgctcgtaggcatcatgtttggcaatgtgatcggcggcatcacgaattatctggcctataaattcgagatgacgcaggcgctttcctcgtggctggtggggcatttctcgctggttctcaagggccgttatgagattgtttatctcgtggtgccgcttgtgatcctcgccttcatcttcgcgaatcacttcaatatcgtcggcatggggcgggatttttccaagaatctcggcgtgcactacaattttgttctgtttatgggcctgacgattgcggcaatgattacggcggcagtcgtcgtagtggttggttcaatttcctatatcggcctgattgtcccgaatgtcgtggcgatgttcaaaggggataagatccgggggacgctggtcgatacggcgctgttcggcgcgatcttcgtccttgtgtgcgatatgatcggccgggtggcgatcttcccgtacgagctgcccatcgagctgatcgtcggtattctcggcagcatcctgttcatcggtctgctgctctaccggcttaggcacgggaggaaggctgtgcgcctcgggcctgcacacacgggcgcctgcgcgggcacggtttccaatacggatggaggtgacggcaaatgagaaatgcagcgcaccgcgccaatgtacgcaagctcattatcatggcggtgctcgtgctgttggcggctgcggcatatatgctggtcgaggttaatttcggaagcgaaaagctctttctgtatgcgatgaagatccgcacgccgaagctcattgctatgctcatcaccgcgtttgcgattggcggcgcctcgatcgtttttcagtcgatcatcaacaacacgattgtcacaccctgccttctgggcatgaattccctttacacgctgattcacacggcggtggttttcgcggccggctccggcagcctgctggcgatgaattccaatctggcctttgcggtggatctgctgctgatggggatcgcggcaacggtcatctacagctatctgttcaaaaagacaaaccacaacgtgctttacgtcctgctgatcggcacggtgctcacctcgttcttcggcagcatccagacgacgctgacgcgcgtgatggatccgaacgagtacgacaccctgcttgcaacgctggtcgcaagtttcagcaacatcaattccgagatcatcgtgttctcgctcgtcgtgctggcggccgtgatttttgcgctgcgcaaggaactcgcgctgctcgatgtgctcacgctcggcaaggatcaggcgaccaacctcggtgtggattatgaccgctgcatccggcggctgctgctcggcgtgacgctgttcatcgccgtagccacggcgatggtggggccgatctcgttcctcgggctgattattgcgaacctctcgcgccagcttttaaagacctaccggcacaaccagctgattctcggctccgcctttttcggcatgatcgtgctcgtgggcggacagcttatcgtggagcacgtatattcctacgcgatcccggtcagcgtattcatcactgtcggcggcggcatctatttcctgtatctgctgctggcaaaaaggagggtatgagccatgcgcgtgcaagaacttacaaagaaatatgacggcaagaccgtggtggattccgtcagctttgagctgccaaggggaaaggtcacggcgctgatcggccccaacggtgcgggcaaatccaccgtgatgggcatcatttcgcgcctgattgcacgggacagcggccttgtggattttgaggggaccgacatcggcaggtggaaaagcaaagagctttccaagcggcttgcgatccttacccagagcaataatatccaaatgaagctgacggttggcgaactggtggcgttcggacgctttccgtattccggcgggcatctgaccgcggaggacaacgagatcatcgaccgcgcaatccgttatatggaactggaggaattccgcgaccgcttcatcgacgagctttccggcgggcagcgccagcgcgcctatatcgcaatggttatcgcacaggatacggaatacatcctgctggacgagccgaccaacaacctcgatatctaccatgcgaccaatatgatgaaaattgtccgtcgactctgcgacgagctgggaaagacggtgattttagtgctgcatgagatcaactatgcggcgttctattccgattacatctgcgcctttgtagatggaaagatagcaaaattcggcactgtaaaggaggtgatgaccaaggaaacgctttcacagatctacagggtcgattttgaaatcatggaaatttcgggaaagcccctgtctatctattattaaccccgttgctttcagaacttttgaagaaaggaaaatgaaatcatgaaaaaacttctctctcttgctttggctatggccctgatgttcagctttgcggcctgcggcacatccagcggaaccgattcttcttccagcacatcgggcgcgtcctcggcagatcccgcttccgagtcctcttccgaagcctctgcggcgccggaatcctccgaggaagccgcgaagccggaaactgtgacgatcaagagcctgaatgggaataaggaagaaacagaccttgaagttccctatgatgcgcagcgcatcgccgtgatggatatggccgcgctcgatattctcgacagcctcgggctgggcgaccgcgtggtcggttcttccagcacatcgctcgactacctgcaggattatgtgacgaatgaaagcgtttccaatctcggtacgatcaaggaggccgatatggaagcggtcatggcctgcgagccggacgtgatcttcatcggcggccgtctctcctcgtcctacgatgcgctcagcgagatcgcgccggttgtgttcctttccaccgatacggagatcggcgtcgtggagagcgtgcgcaagaacgcttcgacgattgcctccatgtttggcgtggaggatcaggtcgattccctgatgtccggctttgatacccgcatcgaagcgcttgccgcgtttgcggcggacaagaccgcaattgtcggtatgtgcacgagcggcagcttcaatgtcctcggcaacgacggccgctgctcaatcatcggcgtggaggttggctttgaaaacatcggcgtcgatgccgaaattgatacttccactcacggcaatgaagcgtccttcgagtttatcgtggagaaagcgccgaattacatctttgtcatggaccgcgacgcagcaattggcaccgacggcgcccagcttgcgcaggagatcatggaaaacgagctcgttatgggtactgacgcctataagagcggcagcattgtctatctggagcacccggcggtctggtacaccgcagagggcggcatccatgcgctcgatctgatgctcagcgatctggagagcgcgctgctgtaactgaaaacaacgatttccttctggaacctgaaagggagggccgccgtgcagaatcagatgccggtggctctcttgttttggggttacactacaaaaaggacaccagaaagggaccgcagtaccaacccgcaaaaggctggtagcgacagggagctgctgcgaggacgtttacaaccgagcaggcgacccgagcgtgaccttttgcggagaaggagcggcaatccgaacggtgaacctcaaggattcgccgcgacgtgggtttacgctacaaaaagatagcaactataaacgcgagcacaaaatcataaataaaaaaatagagcctcgaacgcgaattgcgtgtcgaggctctcgaatggtgcgggcaacaggatttgaacctgcacaccgaggtaccagaacctaaatctggcgcgtctgccaattccgccatgcccgcaaaaataatatcgactgatttattatatcgtattttggagaaaaatcaagccctaaataaaacagaaagggcttcgggcgcaaaaaacggccgaagccccgcttgttttattccacagcgttttcgatggcctcgagaaccgtgtcgtaatccgcttcggtgacgaggaaggagatctccacctcggaggttgtgatcagccggatatccgcgtcgctcgaggcaatcgcgctgaatacgcgtgcggccatgccgggcgtgtttttcatctggggatcgtagacggagatcttgtggttgacgctgcttacgattaccttgatgccggtttccgttttcagcgtgttcatcagtgcgagcacgtcgatgagatcctgatcggagatcgtgaaggagaggcccgcatttgcgccgtgattcggcggcatagagatcatatcgatgttgaccttcagcgcggaaatgcgctcgaacacgtcggccatgaaggtggtcgtggccggactgccctgcaaggtgaccagcgtaatgccgctgaccgtgctgatttgcgttgtacccatctgtttattcctccctttctcagatcatatcggacatatcgtacaggccgggcgccttgccgcacatataaaccgcggcgttgaccgcgccggtcgcgaaaagttccttcgactgcgcagaatgcgagagtgtgatcacctcgtgattgccggcgaaaatgacctcgtgctcgccgacgatcgtgccgccgcggacggcgtgcaggccgatctcgctctttccgcgctttttccgctgggcgtggcggtcgtacacatactgcgtttcgccgtcgcgtacgccggcgatggcgtcggccagcatgagcgccgtgccgctcggcgcgtcaatcttctggttgtggtgcttctcgatgatctcgatgtcgaactggccgccgagcaccttggccgcctttttagaaagctcgatcaaaaggttgatgccgagcgacatgttgcgcgaataaaagacgggctgcgtctgcgcggcggccttcagcgcttccacctgctccgcgctgtagccggtcgtgcagagcacggcgggaatgccgcccttctgcgcggcgtagctgaggatcggcgtgaggagggaggggtgggagaaatcgacgatgacgtcgaccggctcctcgaccgcctcgatctgcgtgtaatttggaaaagcggcggaagcgtcgcggatcagatccacgcccgccgcgatcgtgcagtccgtacggtcggcgacgagctgctgcacggcgcgccccatcttgccgaagcatccgcagagaagaattctaaccaattttatcagtccttatctttgagagatccgttatgaaaaaggcggccctgcacgcctgatacagcgggaaaggccgccttataggcagggcttacgcgagttttacgtgctcgcccagcgcggcgcgcagcttcccgagcatcggcgccgacatatcggtgagcggcaggcggcagcggccgcagtcaaagcccatcatattgagcgccgccttgacggggatcgggttgacgtccatgaacagggcgttcatcaggtcgacatagcggctcgtcatcgcgcgcgcgtccgcgagccggccctcgagcgttgccgcggcgagctcgtgcatctccttgggcaggacgttcgcgaaaacggagatgacgcccttgccgcccatcgcgaggatcggcagggtctgcacatcctcgcccgagtaaaccgcgagttcatcgccgcagagctgcatggtcttggccagcgcggagacatcgtggttcgcctccttggtggcgacgatgttcgggtgctttgagagctcgcaatacgtttcgggcagaatgttgaggccggtgcggccggggacgttgtagacgacgcaggggatatgcacgctgtccgcgatgcggttaaagctctcgatcagcccgcgctgcgaggtcttgttgtagtacggcgtgacgagcaggaggccgtctgcgccgagcgcttccgcctccttggaaagctcgacggcaaaccgtgtgtcattgctgccggtgccggcgataactgggatgcgcccatttacctttttgatcgtgaaatcgatgaccttcgtgtgctcctcgccggaaagcgtcgccgcctcgccggtcgtgccgcaggtgatgatcgcatcggtgccgttttcgatctggtactcgatcagccgctcaagtgcttcgtagttgaccgacatatccgggttgaacggcgtgacgagcgcgacgccggaacccgtaaaaataacctttttcatgcagaaaaaaacctcctgaagctgaaaatcagtcgaaatagcccttcttggcgaggagctccgccatcagaacgccgccgccggccgcgccgcgcagcgtgttgtgcgaaaggcagacgaatttgtaatcgtactgggtgtcggggcggaggcggccgatcgaaacagccatgccgccctcaagatcgcggtcgagcttcgcctgcgggcggtccgcctcggtgaagtagtgcaggaactgcttcggcgcgctcggcagctcgagctcctgtgcggggccgcggaattcggtccagcggcggataatctcctcggcaggcgccttcttttcaagggacatgaacactgccgccgtgtgcccgtcggaaaccggcacgcggaagcactgcgcggtgatcgagggggcagaggcgttgacgatctccccgttttcgatgtggccccagatcttcatcggctcctgctcggacttttcctcctcgccgccgatgtaaggaatcacgttgtcgagaatgtcggggtatgtctcaaaggttttgccggcgccggagatggcctgatacgtgcaggcgagcaccttcgtgacgccgagatccatcagcgggtgaatcgccggcacataactctgcagcgagcagttcgacttgacggcgatgaagccgcgctttgtgccgaggcgctttctctgcgcctcgatgacttcggcgtgttcggcgttgatctccggcacgatcatcgggacgtccggcgtgccgcggtgcgcgctgttgttcgagatgaccgggcactccttcttggcgtaggcctcctcaagcgcgcggatctcctctttcttcatatcgacggcgcagaaaacaaaatcgacctttgagacgatctcgtcgatgtctgcggtggcgtcgagaacgaccgtatcgcagagcgcggccgggatcggatttttcatggcccagcgcttttccacgacgcttttatacgtcttaccggccgaacgggccgaagccgcgagtgcggtaacctgaaaccacgggtggttctcgagcagcgtggcaaagcgctggccgaccatgcctgtgcagccgatgatgccgacattatactttttcattgtttttcacccgacctgtgtgtgcaggtcatcctttccaaaacagaaattgccgctcgtttgatttttgagcgaaaaaaaaccggttgaaatccggtcatccatacaatataatagatatgcgcgggccttccgtttcgggaaaacaccgatagcactccatcacaaagcagatgacagttgcagggctattcgccgcagcaaccagatccccgcgcgccacgatcgccggaaccttcggcggtgtgtcctttcccgcacggcccatcggctcatggcagccgggccggcggtattcatacaaaccgcgcctctatccttattataatacatggaatagagattgttgtcaatttatttgacgaaatttcttccggggatttgcggctattcttacagattggactgagaaatttgacaacggaaaccttacagacgaaagattttgacttttacctgccgcaggagctgatcgcccagacgccgattgagccgcgggacgcctcgcgcctgatggtgctcaacaaagagaccggtgctttggagcaccggcatttttgcgatattgtcgattacctgaaccccggcgactgtctcgtgctcaacaattcccgcgtgctgccggcgcgcatttacggcgtcaagaaggatacgggcgcgcacgtggagttcctgctgcttaaaaactgcgggaacaatgtgtgggaagcgctcgcaggccccggcaagcgcgcaaagaccggcgctgttttcacctttgcgggcagcgcgatgacctgcgaggtcgtggaggtcaagccggacggcaaccggatgctccgctttgactgtgccggcaattttttcgcagagctcgataagatcgggcagatgccgctgccgccctatatcaaggaaaagctcgcggacaaggagcgctaccagacggtgtactcgaaggaggagggctccgccgccgcgccgacggctggcctgcatttcacgccggcgctgctcgagaagatccgcgcaaagggcgtggagatcgcgttcgtcacgctgcacgtcggcctcggtaccttccggccggtcagcgtggagaaaattcaggagcacaagatgcatgcggagcactactggatgccgaaggagacggccgatgcgatcaacgccgccaaaaggcgcggcggcaaggtggtagcggtcggcacgacgagctgccgcacgatcgagtctgtcgccgcaaagtgcggggagatccgagaggacgacggctggaccgatatttttatctatccgggttatcaattccgcgggctcgacgcgctgatcacgaatttccatctgccggaaagcacgctgattatgctcgtttccgcgcttgccgggcgcgaaaatattctgaatgcctacaacaccgccgtgaaagagcgctaccgcttcttcagcttcggcgatgccatgtacattgggtgagaaaatatgagataaaaaagcgagcccgcaaaggcgcagcgttcctgcgtccttgcaggctcttgcgctttagccggaagggggcggcggggcagtcctgcacgccgatgcttaccgggcgctttttctccatatatgtcggagaatttgacggggtgatgtttgtatatccgtatattgtaggctgcatttatttaatttattccgaattttggaaataaaattccttttcgggaagtgcatttcctcttatgctaaaggtgtggggggaggtgattccaatgagaatgaacggaatagaagcggcgggacgtttcggcgccgcgcaggtgcgctcgggtgtctgtgtgcgcggccagcgtaagggccgcagaatggtgccggcatgtgggatgccagaccggaatccggtgcggcataggcgccggtatatccgcgccgagtttgtacgccatcgcgggctgtcccgcgcgcagccctgagaatccgcggatcgccgcatacatttcggaaggaagggaatagttttatggaagactgtgacgttctgcaaacctatgccctgtgggcaggtacatcgattccggataagatcccgggcattccctttgcagatctggacgtatatgaggacgaaaagcagctcagaagccaccttttttaccttgtgccggatatctcgtccggcaggctgcgctgcttcttttattttgaggacaatctcttcgcgaaggacagcgacggagagctgacgctgctcgaatcctctctgcatttgctttcgcagtgaccgccatacatatggaggaggggccggcttgtgccggtccttttctttatggtgcgagagcggcgctgctgaacgcagccttgtttatattcaggcgtaaattcacatacagatgcggcgtttctccacgaaaaattcacaatcccatggtatactccgcgcgggtgattgcttatgaagaatattttaattgtagaggatgagccggatattcaagaattgctgcgggcctacctgcgggatgccgggtatagaacggctgtggccggagacggcgtggaggcgctgagcctgtttgcgcagcagacctttgacctgatcctgctggatctcatgctgccgaagatcgacggcttcggcgtctgcgagctgatccgccagcagtctccggtgcccatcctgatgctgaccgcgctggacggggaacaggagcagcttcggggcttcggcctgaatatcgacgactatgtgacgaagcccttttccatgccggtcctgctggaaaagctgcgggtgattttacgccgcagcggcagtgcggcggcgcaaagctgcgtgcggtaccgagatgtgcttttgaagctggatgagcgcgaggcgcttttgggcggccgccctctggagctgaccgcgcgggaattcgacttgctgcacacccttctggccgtgcccgggcgcgtgtttacgcgggagatgctgctttcgcgcctttggggctacgatttctacggggatgaccgggtggtggacagccacatcaaaaacctgcggcgcaagctcgggcgcgactatatcgaaacggtgagggggctgggctatcgtgctgcgaaggaagatcgctgaaagcctgaccatccgcatttttctgattaccgccgcgatcctgctctttgcggtcggcgccacctttgcgctgatcgcatgggctacgccgctcacctacacggctgtagtcaatgaggatctgacgcggcttacgaaaaatctggcggaggcgctttcaaacacggatttaaaggacagcgggccgctgctggacgcgttcgtccggtctgccggcgcggacgtgacgctgctcgatgcggacgggcaggctgttgataccggctccaagctcgcgctgtcgccgagaagtgtggcgaacagtgcagaaacgacacgggacgatacagacgcagaggagaccggcgtcacgtgggtcacggatataggcggggagcaggaggtggcctttacgttctccgagcaggacacgatcgcctgcgaggtgcagcttgcagatcagacggagcgctgcattctctatgtcacgccccgggtgaaagcggaaaatctggctgtgcgcgctctgcttcagatggcgccgtggcttgtgctggttctgaccgtcgtttcgcttgtgtgcgcgcacgtttattcccgctgcatcacgcggccgatcgtccgcctcagcggcattgcgggcagaatggcggagctcgattttggctgggtgtgccgggagaagcgccgggatgagatcggcgcgctgggccgcagcttggacgaactttcccggcggctgtccgccgcactgacggagctggagggtgcaaaccgcgccctgcggggcgaggtggagcaggagcgggagctggaccgccagcggacggcctttttctccgccgcctctcacgagctgaaaacgccggtcacaatcctgaaggggcagctttccgggatgctggagggtgtggatgtctatcgcgaccgggacaagtacctgctgcgctctttgcaggtgacgggccgcatggagaacctcatccgcgaaatgctggagatctcccgcatggaggccggtgcgacggcggttcgttcggagacggtggagcttgccgaacttctgcggcggcagctcgccctgtatgaggagctgtttaggcagcggggccagcgcctgacggctgcgctgaccccgggcgccgcggtttccggagatccggccctgctgggcagagccgcgggcaatctgctttcgaatgccgcgctctattccgcggagggagcggaaatccgggtgtggtgcggattgttcgaagggcagccggcgctgacggtggaaaacaccggggcgcatatcagtgaggcggcgcagccccatctctttgaggcgttttaccgcggggaatgttcccgaagccgcgcgaccggcggcagcggcctcggcctttatctggtgcagatgatttcggcgcggcacggggccagctgctcgattgagaacacggcggagggcgtgcgcgcgttgatccgctttgccggcggcgtggaattataaacgcagcggggcgccgttctccacgaaaaacacataatcgctccatgcgcgcttcatatgcgggcggtatcctgacactgcaattcaagcagaaaggatactgaatcatgcaaattgaacttcaagatttatgcctgacctacccaaacggaaagcaggcgctgcagcacctgaatctttcgctgtgcgcgcccagcctgatcggcctgctggggccgaacggagcgggaaaatccagcctgatgaagctgctcgtgaccgcgctgacgcccacctccggcagcattcgggtggacggctgcccgctggacaaggcagagcggcagctcaaggcgagcctcggctacctgccgcaggatttcggactgttcgacgaattgacggtggtgcagtttttggactacatggcggcgctcaagggactgcgcgcgccgaaggccgcaatcgagacggccgtgcacgcggtgaatctggaagaaaaggcgaaagcgaaaatccgcacgctgtccggcgggcagcgccagcgcgtcgggatcgcgcaagcgctgctcggcgatcctgcgctcctgattttcgatgagccgacggtggggctggacccggaggagcggatccatttccgcaatctgttctccaaaaccgccgaaaaccggctggttctgctgtcaacgcacatcatcgacgacgtgcagtcggtgtgcggccagctcatcgtcatcgacggcggcaggatcctgtttgccggtacgccggaaaagctgatccagctcgcggcgggccatgtggggagcttttgggagcaggaggccgcccgggagcaggggctgcacatcacggcccgggtcaataccggccggggcgttcgctgccgggcggtggccgattccctgccggcgtacgcccagccggaggagccgtctttggaggacgcctacctctacttgatttcaggtgaggtgcgccgatgaacacgctgcgtttattcccgcaggagctgcggcggcttctgcaaagccggctgaccgggctcactgtgctgctgaccgtcctttcgccgctggtgggactggtgctttaccggcccgccgatgcggacacgatgctttccgtgtaccttgcgaatcccgcgcttgcggggggcgcggcgggcggcatcctgttcggccttctggccgtgtacgagtgggaccgggccgcccggtgccgggccgataggctgaccgatgcggcggtttccccgctcattctgtctcttgcgcgcctgttcgcccttttaacggcggcactgctggcggcatgcctgactgcggcggtctggtttccggtcagccgggtactgatcggctccgtgtttgacggcacggactacattctcgcgtatctgctgtttatggggttcgccctgccgctgtcgattctggcggcctcggccttctaccagtttacccggcgggccgacctgtccgccgtgctttttgcggcgtttgccgggctgagcctcaccgtctgggcggagaattggcagctttgctggctgaacccgagcgtttgggctttgtccgatgatttctctaacaaccgaattttccgctccgcggcctatatgcgtctgacttggctcgcggcgctcgccggcgtgtgggcgctgtcctacctctgcatccgccagcacggaaagggctttttcggctcgctctgccggagcgtccgccgtgcctaccggccgttgatcgccgtgcttttgctgacctgcgccggcttcgcgtatgcggcgcagccctttgtggatcagagcaatccggatcagacggtgatgaccttctacgagatcccgtatgcagagggcgtgacctgctcggggcgcagcgcagaggtgtatccggataccgcggccggaaccctgcggggccgggcggcctttgcgtttcagaacacctccggccgggcgcagacggtttccttcggcgtcacccccggctatactgtcacgaatgtgcgggcaaacggcgcggacgtgcccttctctttgggcgattatcaggaattcaacgaagccttgctggaggtcacaattcccgcagaggcgcaggtggaactgacgatggaatacggcggctttccgaaggaggaccgcagcctctcctcgatgcagggcggcagggagatcagcgacacgtacatttgtcttgagaacgccgcgctgtcgccgcgtctgctgaacgtgctgcctgccggtgagacgtaccccgtggaaatcgagatcacgctgccggatcacatgaccgtgctcccgttcggcgcaagcgaggcggaacgtgtggcggagcatgaaaacgggacggcgacctggcgctatgcagacaccggaaccggcgggattctctacgccggcgactatatccgggaggatattcaggccggcggcatcaccgtcgaattctattacgggcgcaaacatcaggcggttatggaggccgccggggcggcggaggctgtagaagccgtggtgaactactgtacggcgcattacggcgcgctttctttcggcggagacagcctcaagctgattcagagccgggttgcaggcggcggctatgcctcggacggcgcgagcctgctggatgaggccgacttcgccgccctcaatcttaaaaacagcgataagggcgccgcggccggcgaggtgatgattcacgaactggtccaccagtggtggggcctcggcaatatgtttgacccggcgggcgacgacgcttggtcggcggagggcctgaccgtctacacgacctaccgcatcgcaaaggcgctctacggggaagaatatgcccgtgaaaactatgtggagcactggcagcaggcggtggaggaatacagccaaaatttctacgtgcgcaatccggattttctggaagcgctgccggaagataagcagctcgagatttcgaacagcctctcctatgtgcggcagtacagcgagatgccgctgaaaattttaaaggcagaggcgctggtgggcggcgaggccgctatggatcaaatcttgaacgggcttttcaatcgggagctggaccccgcgtatccctatttgacctatcaggcatttttggatgcctgcggcctgacggaggaggatgtaacccttgattaaaatatttgcttatgaatgcaggcggctgctgtggaacaaattcttttttggtctgctggcggcgacgctcttttacggctggcaggtgctgaacggcacgacgattctcggggtgtcccgcaccgcgcccttttccccgtggagcttcggtgattacctgagccggatgctgccgctgctgtggatcggcgcgcttttcttcctgacctttttcacctcggccaaggcgcgccgtaccgccgtgctgacagacgccgcgcccgtcgtgccgcggcggtatgcgctggctcgcggcgccgcggcgcttgcggggaccagcctgctcgcactgggcagccttatggaagcattcttcttttacggctggtattttcactggtctgcgtggggcagcctgctgctgccggcagccgccgtactgatcccgccgctgggctttgcggtcggcagcggctgggtgctggggcggctgaagccgtggttggtttacgtctggatgccgctttccgcagtctgcgcggccgctccgcttccgcaggctttaagcctctggaacgggcgctttttcaccgaggcgcctttggcatcggaggtgctggatccggccttttatctgccggcggaggttcttttgggccagtgtgcgctgctgcttgcaggggccgcctgcctcgtgctgctggctggaaagccgcgccggcatacgctgtgagtgctttttcggcggcgggcagtttgtagaaggatagggtgcggcttccgtatccggcggggatgcgccgtccctgcggtcgaacagcggcgttccgagccgtccggcagaccgaaaacggcgttcaaaaagcattggcgttccgccggcatgtatggtataataaaaagcacaggcgcgcggcgcgtgtgaaaaacaggaagcgaggtgggcggcgatgctgaaacagctccgctactttcaggcggtggtggaaaacaagagcttttcaaaggcggcggaggaatgttttatttcgcagtccgccatttcccagcaggtacaggcgctggagcgggatataggcgtaaggctgctcgagcgcaaggggcgcagcttttccgtgacgccggcaggggagcacctctaccggaaaagccggccgcttttgcgggagtgggagcggctggtcagggaaacgcaggatattgagcgcgggagccgggaagcgatccgcctcggctgcctgcgcagctacagcgggccggaatttcaaagggcggtgctggtcttttccgagcggcatccggaaattgaactgcacatccgcgccggcagccacgaggagctgtatgagctgctggtttccgggcagatcgacctgctgctcagcgatcagcgccgcgcgttttcacaggggtatttcaatgagattctggcggcgcggccctatcaggcagagcttgtggcgcggcaccccatcgcgcagcgggaggccgtggcggtggaggatctaaaggcgctgccgtgcattctggtgagctcggcggagcagcgggacatcgagcgggattattaccgggacatcgtgggcctgcagggcgattttctctacgcgggcagtctggaggaggggcggctgctggcggcgggcggaaagggctttttgcttttagaaggcgcggatgcagggcaggacggctctctcctgcggcgcgtgccgctgacgcgaagcggcaggccgctgctgcacaactactgcgcgttttggagccgggaaaatacaggccgctccgttcacgcgtttgctgacgtactcaaagcacagtttgaagaattgaatggatgagccgggcacccgcaagcgactgcgggtgccttttgcatcagtttttcttatggataagccgggaaaaaggaattgatttcaagcccctgtatctgataggataagtacagaagagacaggggggatgctctatgaagaatgtgctgattatttcatccagcccgcggagaaacggcaacagcggccagctctgcgcggaatttgcgagaggggcgcgggaagccggatgctcggttgagaccgtggcgctgcgtgaaaagcagatcggtttctgccggggctgcgaggcctgcgtcaaaaccagcgggggctgcgtgcagcaggacgatatggccgagctgatcgaaaaggcgtgccgggcggatgcgcttgtgttcgcctcgccgatctacttcatggcgctcagcgcacagcttaaggtattcatcgaccgctttattgccggagaaaaccgtatccgcgcgtcatccggaaagaaggcgtatctgatcacgacctgcgctgcgccggaggattttccgcgggatcagcacgcggcggccaacgccgctttccgcggtttcctccagtgcctgcgcaccgtggagctgggcgggattctcaatgcgagcggactttcagagccggggcaggcggccggcaccaaatgggcggcacaggccttcgagatgggcagaggcatttaggaggcggcaaatggcgaatctaatcttatactactcccgccgtggagaaaactacgcgggcggggctgttgtccgcttggaaaagggcaataccgaaatcgtcgccgaatatattcaaagggccgtgggcggcgagctgttcgagcttgagacggaaaagccctatgccggcgattacgacacgtgcatctggcaggcgaaggccgagctggagcagggggcccgcccggcactgaaaaacagcctgcgcagcatagccgcctacgacaatattttcatctgcggcccgtgctggtgggggacgtatccctgcgcggtattcagtcagatcgagcggctggatttcgcgggaaagcgcgtctttcccgtcatgacgcacgagggcagcggactcggcaggggcgtgcgcgatctgcagcggctctgcaacggcgccagcttcggcgaggggctggccgtcgtgggaagccgtgccgcgcagtcggcgcaggcgattgcggactgggcgcgctcgtgcgtatgaagccggagaataccggccgcagcagggtggcttacggcagctgcgatgaaacgtgtaatcgaatgaataaggatacagcaggaggaaatatcatggaaaagctatttggaagcaaaaaattcgggttcggatgcatgcgcctgccgcttctggaaaacggcgaggtcgatacggcgctgttcacaaaaatggtggatcggtttatggaacgcggctttacgtatttcgacacggcgcacggctacgtctccggcaaatcggagccggcgctgaaggtttgcctcacgagccgctacccgcgggagcgctataccgtcaccgacaagctgtccacccatcatttcaatacgcaggcggagatccgcccgctgtttgaaagccagcttgaggcggtcggcgtgacgtatttcgacctctacctgatgcacgcgcaggacagaaatatctttgaaaaattcaagcgctgccgcgcctatgaaacggcgctggagctcaaaaaggaggggaaaatccggcatttcggcatctccttccacgaccgcgcggaggtgctggagcagattctcaccgagtacccgcagatcgaggcggtgcagatccagttcaattacgcggactacgaggatccgtccgttgaaagccggaagtgctatgaggtgtgcgtgcggcacggcaagccggtgatcgtcatggagccggtcaagggcggcagccttgtgaagctgccggaggcggcgcagaaggtttttgacgggctggaaagcccgctgagcaacgcgagctatgccgtgcgctttgccgccggattcgaggggattcggatggtgctttcgggcatggagaatctcgaaatggtggaggataatacgggatatatggagcattttcagccgctctccgaccgggagctggcggctgtaaagcgcgtgacggagattttccgcgcgcaggatctcattccgtgcacggcctgccgctactgcatggaggcgtgcccgaagggaatccgtatccccgatttgtttgcgcttttgaacgccaaaaattgctttggaaactggaacaccgattactactacaacaatgtccaaaccggcgagggcaccaaagcaaaggactgtctgcggtgcggcaaatgtgaggcgatctgtccccagcatctgaaaattcgcagtctgctggaagcggtgtccgctgaatttgaccggtgaggcggcgtcctgtctgagaaatcctctgcataagcatgcggcatataatgtcgcggtattgacagaacagccgatcggatgtatagtgtgatttcaatgcaccgcttcattctgccgcgaactgcggggcagccggcagattatcttgaaaagcgagtgcgtttattttgagaaaagctgcacttctgtttttactgctgccggcggtcttgttctccggctgcgcttcgacttcagcggggttcggcgctgcgctgatgttctggcataattacggcgcgagtgcctcggacgaggattttttcttcacgtgggaggatggaaagtggcggtacagtgttctgggcaaccgctccggcaggcagtttgcgctgtgctttacaccgacggagacgggtctgcgcatcagcgtggtctgcgaggatggcgcgtactattcgtggacggccggtcaggcggatacggtttggagcgacgcggaatatacggctgaatagccgggaaatacggcagggaagggcttcggatttatttggaatccgaggccctttttgtaccggaattctgtgtgaaagttctgccgcaggccgctgagcaaattcgatttgcggcggctcgcgtggatctaaaatggaacgcgggacggcagccgaacggttttttacgggctgtgattttgatcccctgaatcaggagacaaaaaatatttaaaaaattggtaaaaattggttgactttaccggtgcattggtgtatagttgtaagtacaaattagagaaatgccgaaaagagaagcgcttctcttttataccggatataaatatccggtataatctcttactatttgcataaaacggccgggttttaggccgggtttaattggatataaaaagattgcagaacaggccggccgccggatttgactggcgcgcaatcgggccgaagcgtgacttttaagccgcgcggacgcactgcctttcgaatgcaggggatacgggagtccgcccggtgatccggcggatattttccacaccatcccttttatgcatacagcccttggagaggggctttaatcactactacattcaatctgcaaggagacgaagaacgaatgacaaagctatggagacgcgcggccgcgattttgatggccggcgcgatgacagcgggtctcgcggcctgcggcggcaacagcagcagcggcggtacgaacagcgcggacggcgccgattccggcggcacgagcggcagcggtgaggttgtaaagctggttgtatggggcgttggcacggcggatacggacgactgcaacgaggtggccgaggcgatcagcgcgatcacccgcgaggagatcggcgccgaaatcgagctggtccgcgggcaggacgccgagcagattaatttggcgctgacctccggcgaagccatcgatatgctgaactacaacaacgtttccggccagcttgcggccattgtccgcaacagctatgccacggcgctggacgatctggtcgagcagtacggccaaggggcgcttgagatcatcgaccccgtggatctagacgcctgccggttcggcggcgtgctatacgcgctgcccgatatgaaagatacctcccgttccgccggcttctccatgcgcaaggatattgtggatgcgctcggcatcgaggtgcccgaatacggcacctatgaggacatgtacgagatcctgacgaaggtgcatgaggcgtaccccgatatgtatccgctggtgcccacatgggctggcggcggcatgcaggagtctctgccgatcgacccgctcggcgataatctcggtgttttggagaacgccttcgaggacagtaccgaggtcgtggattactattcgatggacagctaccgcgaattctgcgagatgatgtacaagtggaacagcgagggcctgattatgcccgacgcgaccacgacgacggagaacaacctgctttccggcaacggcttcgcgatgttcgagaactggaagcccggcaaggagcttgaaaactacaagtccaccggcaaagaggtcgtctttatgaaggtgattgagccgtacaagtacaccgatatctcgaacggcaactcattcatcattccctacagttcctcaaaccccgaaaaggcgatggagctttggaacctgatgtacacaaacgccgaggtctcgaacctcttcatcaacggcatcgagggcaagcactgggcgtatacggacgacaccaaaacctttatcagcacgcccgagggtgtggacccgaactcgagcggctactcctccgtggactggggctggccgaaccagcagatcacaccgatctgggagggcgccgaggccgatttgtgggatcagctcaacacgttcaatgagagcggcgtcgcaagcccggcgcacggcttctcttgggacagcaacccggtgttgaatcaggtgactgcctgcaacaacgtggtttccgagtatcacacggcgctgcgctggggcacgatggaccccgcggagaacctgccgaagttcattgcagatctggaagctgccggcatcaacgagatcatcgaggaaaagcagaagcagctggatgaatatctggcaagcaagggctgagcctcatagcctgctacataatcgcgcaatacatggaaggcgggtgcgggagcttcccggcccgccttccgcttcttgtgcaatccatcctagggaggaatgaatatgaagaatgtcggaaaaacgatgaagcgcttctggcccctttacctgatgttcttgcccggcgtcatctacctgtttgtcaactgctatatcccgatgtttggcattcagatcgctttccggcagtacaacgccagagacggcatctacggcagcccgtggtgcggcctcgataactttgaatttctgttccgcacggacgacgcctttgttatgacccgcaacacgctgctttacaatctggtgtttatcgtgctcggcacggtgctcgctatcgcggtcgcgatcattctcaacgaggtgcgcagcaagagcgccaagcaggtgtatcagaccgtgattttgattccctatctgatctccatggtcatcgtcagttatctcgcgtttgcgttcctgagcagcagcaacggttatatcaataattccgttctgaaggccttcggcatggaggctgtcgactggtacacgcagcctcaatactggccggtcattctggtgatcatcaacatctggaagggtctcgggtacaatatgatcctgtactacgccacgatctgcggcatcgaccacacgctgtatgaggccgccgtggtggacggcgccacacgctggcagcagatccgcagcatcacgctgccgagcctgaaatctacgatcatcattttgacgctgatggcgctgggcggcattttccgttcagatttcggcctgttctatcaggtgccgcagaattccggcccgctgatcagcgtgacccagaccatcgacacatacgtgtaccgcggcctgatgcagacgaacaatatcggcatgtcctcggcggccggcgtgtatcagtcggttgtgggtttcattctggttgtaagcgcgaattttgttgtccgcaagctggacagcgagagttccctgttttgagaaggaggcagcagagtatggtagaaaaaggaagaggatttcaagtttttgcgcacatcctgctggtctttctcagcctttgcgcggtcgcgccgttcattttgctgatcatgtcctccttcacggaggagcagacgctgatcacaaacggctacagcttctttcctgaaaaattcagcagctacgcctatgcgtatcttttgacggactccacggcggtggtccgcggctacggcatttcctttctggtcacggcggtcggcacagtgctcaacctgctgcttacgaccctgtacgcctatccgctttcgagaaaggacctgccctgccgaaacatcttcgcgttttatctgttcttcacaatgctgttttccggcggcctcgtaccctcgtacatgatgtggacgcagaccttccacatccgcaacacgctggtggcgctgctcgtgccgaacctcttgatgggtgcgttcaacgtcatcatgatgcgcacgtactttacagcgaatattcccgacgccgttatcgaggcggcgcgcatagacggcgccaatgagttcagaatcctctacggcatcgttctgccgatggcgctgccgatcatcgcgacgatcggacttctcgtcggcctcgcctactggaacgactggatgaacggcctgtactacctcaacgacgacaggatgttcagcatacaggttctgctgatgaacattcagcgcgatctcgattccctgcggcagcaggcgcagtccggcggcaatgtaaacagcgccgatctgccgtccacctccgtgcgcatggcgctgaccgtgatgggcgttctgccgatcatgatcatctaccccttcatgcagaagtatttcgtcaagggtatcgccatcggtgcggtcaagggctgaggcagacgcgcaattaggatcatatagttctaaaagcaaaggaaagagccggataccgcaggggattccggctctttttctgcgtcttgcatgcggcgtcagggttgaatcaggcttaaaatgtggtataatattccgggaatagagaatcgttctgaggcgggaatctactgcttgcggatgagaaatatacggtatcgattgaagaggccgcgcaggatctttcgcgcgtgacccggcttgtggatgaaaacggcgcgccgcgctatctgatcgtggaattcagcaaaacagaggcggagcagcccgcacaggactgcaccgtgcaggcagcggctcaaggagaaaaaacaaaaggcttgcgagatgcttgcaaaatgaaggggctgacaaagacgcagattttggcgctgcacgcagcgatggtgcggggctttggcggaacggacgggctccgcaacgaatcgctgctggattccgcgctgaacgcgccgtttcaggcgttttcgggcgcggaggcgtatccgtcgatcctttaaaaggcggcgcggctggggttcggcctgatcggcaaccgcgcctttctggacgaaacaagcggacgggcgtgcacgcgatgctggtttttttcgcggtcaacaggatcgaaatggagtacgcgcaggaggagctgatcgcgattatcctgcttatggcttcggacagggcggactgcggcgcgccggcccagcagaggcttgcggatcaggcgtgagggtgctgcctcccggcgccgccgcacgaaagcgtttgaaaaagcgcggactttgtgctatactctttttgagtgataaacggccgcagcctaaaggggcgcggccgcatatgtaaatgaaacagggagtgagaggcaatggcgaacccctacagggatgaatttattgcgctgtttacagagaacatcgcgcgcgacggcgcgcagaagctgctttcctggcttgatacgacggatttttacaccgcgccggcgagcacaaagttccactgcgcctgtgcgagcggcctcgtgatgcacagcatcaacgtctacaagacgctgcgcgagcggtatttcgaggagggcgacagcgaggagagctacgcggtctgcgcgcttctgcacgacgtgtgcaagtcgcagttttataagacgtccacgcgcaacgtcaagaatgaggagacggggcagtgggagaaaaagccattttacatcgtggacgatgcgttcccattcgggcacggcgagaaatcggtctacctgatcgagcgcttcatgcgcctgaagcccgccgaggcgatggcgatccgctggcacatgggcggctttgacgatgcggcgcgcggcggcagctttgcgatcagcgtggcattcgaccgttatccgctcgccgtcaagctgcaccttgccgatctcgaggcgacgtatctccgggagaagggcacctcagaggcccggtaaggcggcagagaaggagatttgctatgtacgcgattcaggcgtccaacctgacaaaaaaatacgagcaggtcgtcgcgctgagcggactggacctcacggtggagcccggcagcgtgatggggtatctcggcccgaacggctcaggcaagacgacaaccgtgaagctgctgaccggtttggttcagccgacggtcggcgacagcacggtgctcggcctgtcctctttcaaggaaagcgagaagatccatgcgcttaccggcgtgctgaccgaaacggccgcgtgctaccatcatctgagcgcaatggagaacctgctctttttcggcgcgctgttcggcctgccggaagccaaggtgcgcgcgcgggcggaatacctgctgaaaaagctcgatctctgggcggcgcgcggccgcagggccggcacgttttccacgggcatgaagcagcgactctcgctggcccgcgcgctgatccacagcccgcaggttctgtttctcgacgagccgaccagcgggctcgacccggagtctgcggcaatcgtcaaccgcatgatcgccgccatggcgcgggaggagggcgtgaccgtgctgctgtgcacgcaccagctccgctatgcggccgatatttgcagcgatttcgcaattttagagcacggccggcttcaagcggcgggcacgctgcccgcgctggtcgaggcgtccggcgtccggccgacagcgtcgttccgcgttgcggagggcgccgatgtgccggaggggctggttcaaaacggcggctgctgggaaaaaacaatggaatccgaatcggaaatgccggcgctcgtcgaatcgctcgtcgcaatgggcacgccggtttacgaggcgctgatccgccggccgacgctggaggacgtgtatttcacctttgtgcaggaaaccgaagggaaggagagcgggcaaaatgcagaagttgttgaataaattcttttctccgggcgaatgcgcgctgatccgaaaggactttgcggagatctggagccagaaaatggtgcgcagctcgctgcttgttctgccgctgatgatgtcgttcggcctgccgctgctctttctgctgatcgccgcgctggcgccgctcgaggagatcgacatcggcccattccgcacgctgctcggcacggcgctgccgcagaccggcgtgcgcgggcagatgttctatgtgttcacgaattttatctgtccgatgctgttcgtaatgatcccgctgatggtttcgtctgtttcggcttcctgcacgtttgtcggcgaaaaggagcgcggcaccatggaaacgctgctgctctcgccgctgagtgtccgcaagctgtttcaggcaaaggtggcggggtgcgctctgctcgcgggggtgatcacgctgctctcctttgcggcctttttcgccatcacggctgtcggcggtattttgaccggcgcgccctttttcttcaacctgaactggttcatcctcgtttttctgatgtccccggccctgatggtgctcggcgtcgtgttcatggtgatggtttccgggcgctcgaaaacgacggtggaggcgatgcaggtttccggatacatcgttttcccggttttgctgttgtttgtcgggcagattacgggcctctttgtactggaatggtggatgctgcttgcggtgacggttgtgatcgctgcggttgacctgctgcttttcaaccgcggtttcgcaaaattcacggcggaaaagctgctctcttaaacgatcggaggaaaaacgatgtcgatagatttacactgccatacgcggtattcggacggttccacgccgcttgaggaggttatcgcgcttgcggcgctccgcggcgtcggtacgctggcgatcaccgaccacgatacgatggccggctgcgaaacggcgctgcggctcggccgggaatatggcgttcggatcattccgggcgtggagatctccgccgccgacccggcacgcggcggtaaagcgcatattctgtgctacgccccagcgcatccggagcgtctcctgccgcttattgatgagacgacgcgcagccgccgtgcggcgatgcaggcctccgtcgaaaaggtcatgcggctgtacccgatttcccgggaaatgatcctgcgccgagcggagggttcgaccaatatctataagcagcacgttttgcaggcgctgatggatgcgggctatgcgggggagatgttcggcgaggtgttccggcggctgtacgattccaaaagcggcgcggcctacgtctccgtgcagtatcctacggtatccgaggtgctggaggcgatccgcctttccggcgggctcgccgtgctggcgcacccgagcgaataccacaatatggagcttttgaaggagctggcaaaggcggggcggctcgacggcgtggagatccaccacccgcggaatacgccggaggacaaggccgcaatgcacgaaattgcgaggcgcttcggccttgcggaaaccggaggcacagattttcacggtttttatacaacacgaaaaaatccggtcggcacctttacgacggcgcagaccgaatttgataaattgtttgcagacagaaaggaagattgaatatgaaatacgattttaagccgcgcggcgtttgctctagggggattcacatcgagctcgacggcgacacgatccgctccgttcgctttgacggcggatgcagcggcaacacgcagggtgtcgcggcacttgcggccgacatgaacgcgcgcgagtatatcgagcgctgcaaggacatcaagtgcggctttaagaacacgtcatgtccggcacagcttgcgatcgcgctcgaacaggcgcttgcagagcagaagtaaacagacaaaaaggcgggcgcaggcctgccttttttgacgcgcggcgtatgccgcggctcgagaggcgccgcagttattcctcctcttcgccgtcgagaaaatattcgagggagacattgaaaatctctgcaaaggcgatcagctccatatcggtgacgtagcggcggttgttttcgattctggtgatggcgttcttgtccatatcgcagcccgcaagctgcgccttataggacaggatccgctgagaccagttgcgcttctggcgcagcttgacgagcttgtggcggatcagattccgctctcctgtaactggatctggctttggcatatggcggcccttctttcatatcggtgtagttgtgggcggactccgccccgatgcaggcgcggcgcccggcgtttagaggagcgctgcggcataagggacaaagactctgatacaaatataccatagtatttcaaaaagcgaaagggttttttggataattatggaaaatattacggcgctgcttcattggtggcacagcaaaagggcggacagcatacgctgtccgccctccgctatactgggcagttagcagccgcagttgcagccgcagtcgttgttattgttgcagccacagctgcagccgcagttagaaccgcagccgccgaagccgttgccgcagcagagaaggatcaggataatgatgatgatccaggagcagcctccgccaaaaccgttacacattgtcttgcgcctcctttcgtttacagtacatgatatgtcaaagcgcaatttgtgttccgatttttaaaaaacagaaaataagagataaaaagagaaaaacgaaaaaattaaaagaaaataaaacacagataaaaataaacgctaaaattaaatgattttcggaattgacagggtaaggaattcaaaatataattaaagtcaaagaaagtcaaagacagaaaaggagggctcgagatgcgaatcagcgacagcgttgcaaactatatattacagatgctgaacgatgcggacggcattgcggaaatacagcgcaatgagcttgccaatgtgtttggctgcgtgccgagccagatcaattacgtcatcacctcgcggttcacgccggagcagggatacatcgtcgagagccggcgcggcggcggcgggtatatccgcatcacgcggcgccgcatgtcgaaattcgatatggtcatgcacattgtcaatgcgattgggcagactatagacgcggcctctgcacgtgcgatgctgcaaaaccttgtggaaagcggtatggctgaacagtcggatgcccaattgatcgcggcggcgctttcggataaatcccttgcggctgcaccgaaggagatcagagaccagctgcgggcggcgatctttaagaatatgctgctcgttctgaacacataaatacgaccaaaagaaaggcgggagattgatatgctgtgcaaaaactgcgggaaaaacccggcaaccacacacataaagaccattgtgaacggaaagctcacggaatacgacctgtgcagcgaatgtgcccgagagatggggtacacaaacttttttaaggatatggattttaatttcggcagcctgctcggcggatttatcggtacgcctgcggcgaagggaacggcggtgcggtgcccgaagtgcggcgcgtcgtttgcggagatcaccgaaagcggcaagatcggctgcatggaatgctataaggtgttccacgaccggctgctgccgacgatccaccgcatccatggcacggcaaagcacaagggaaagatccccggcacggctgcgctgcgcattgtggagccggctggaaagatgaccgttgtggaggtgtctccgctcgataaaaagcgtgcggcgctgaaggcggcgatcgaaaagcaggatttcgagcaggcagccgtgctccgcgacgagatccgggagatggaaaagggggaacagagcaatggataagacagcgagaaaatggtacgaaaaagccggagaatgcagtgacgttgtgatcagcacgcgcgttcgtctggcgagaaacctcgcggcgttcccgtttccgaaccgcatgacgccggagcagaaggccgaggtcgaacgccgtgtgcgcgacgcgattttgaacagtaacagcgctatcgccgcggatttcagctttttgcagatggatgacctcagcagcgagcaggctgtctcccttgtggagcgccacatcgtcagtccggaatttattgcaaattccaaagggcggggcatactgatctcaaaagatgagagcatatctattatggtcaacgaggaggatcacgtgcggatccagctcctgcacgagggcctctcgctgacggagacggccgaaacggccgaccgcatcgatacgcttctgaacgaaagcctgaatttcgcctttgatccggagcttggcttcctcacgcagtgcccgacgaacctcggcaccggcatgcgggcctctgtgatgctccacctgccggcactcaccgaaagcggcgcgatggggcgcatcgcctcgaatctctcaaagctcggcctcgttatccgcggcacatacggcgagggcacgagcgtgaccggtgcgctgtatcagctctcgaaccagattacgctcgggctgagcgagcgcgaggcggtggaaaacctgcagaacatcgcgaaccagctgattcaggaggagcgcaaggcgcgcaaggtgctgctcaagaacatcgcggtgcttgaccgcatcgggcgctcggccggcgtcatccgcggcgcgaaagtgctctcctgcgaggagtatatgaagctgatttccaatgtccgcctcggccttgcagagggcgtgctttccggcgtaccgctcgaggacgtcaacgccctgacggcggctgtgcagcccgcaacgctgaccgccgagcaaaatggcagcctgacggcggcgcagcgcgacatcgcccgcgccgagatggtgcgcgaggcaatgcaaggcctgcgataaaagcgtgtgcggagcaataaccgctttcagccggtcttatccggcagagaacaattaaaaaacagaggtaaggagtgatttttatgtatagatttacgggttttacggaaaagtccaacaacgccatgaacattgcgatttcagcggcgcaggacatgggccacaattacatcggcagcgagcacgtgctgttcggcctgctttccgagggcagcggcgtcgcgtttaacgtgctcaataagctcggcgtgacggcggacgcctacgaaaagctgatgcgcgagaagatcggcacatcctcgccgaccacgctgtcgacggcatatttcacgccgcgcacgaagcggattctccagatggcgaagctcgcggcctcgaagctcggcagcaactacgtcggcacggagcacctcctgatcgcgatcatcgaggacggcgagagctttgccgtgcgttttctccagatgctcggcgtggagccgcagcgcgtcgtgaatgagctttccgcggcgctttccgagggttatgccgtcgacaagcagtccggcgcgccgtatccgggcgcggaaccgggtgagaaggaaggcggcagtgcgcttgagaaatttggccgcgatctcacgaagatggcggcagagggcaagatcgacccagttatcggccgacaaacggagatcgagcgtgtgatccagatcctctcgcgccgcacaaagaacaacccggtgctgatcggcgagccgggcgtcggcaaaacagccgttgcagaggggctcgcgctgaaaatccacgagggcgaggtgccggagctgctgaaaaacaagcgcctgatttcgctggatctgaccggcatggtcgccggctccaagtaccgcggcgattttgaggagcgcatcaaggcggcgatcgacgaggtgaagaagaacggcaatgtcatcctctttatcgacgagctgcacacgatcatcggcgcaggctccgcagagggctcgaccgatgcggcaaatatcctcaaacccgcgctggcccgcggcgattttcaggtgattggcgcgacgacaatcaacgagtaccgccagcacatcgaaaaagatgcggcgctcgagcgtcggttccagccggtgcatgtcggcgagccgaccgaggaggaggccgtgcagatcctcgaggggcttaaagaccgctacgaagcgcaccacaaggtgcagatcaccgatgaggcgatcgagagcgccgtcaagctctcttcgcgctatatcgcggaccgctacctgccggataaggcgatcgaccttgtcgatgaggcggcctcgcgcgtaaggctcagaacctttacggcgccggaggatttgcaggagctcgaaaagcgcatcaaggaggtggagctcgacaaggccgcggccgtcaacgagcaggactttgagcgcgctgccgagctgcgcgacaagcagaaaacgctttcggatacgctcgagcagaagaagaacgaatggactgcgcacaatgagcgcagcaacagtgtcgtgaaagcggaggacatcgccgagatcgttgcgatgtggaccggcatcccggttgtgcagctcacgcaggaggaaagcgaacgcctcttgaagctcgaggaaacgctgcaccagcgcgtcatcgggcaggatgaggctgtcacagcggtttcgaaggccatccgccgcggtcgcgtcggcttaaaggataagaaccgcccaatcggctcgttcattttcctcggcccgaccggcgtcggcaagaccgagctgtgcaaggcgctggccgaggcgatgttcggcgatgaaaaggcaatgatccgcctcgacatgtccgagtatatggagaagcacacggtatcccgtctggtcggctcgccgccgggctatgtcggcttcgacgagggcggccagctcaccgaggccgtgcgtcgcaagccgtattcggttctgctgttcgatgaaatcgagaaggcgcacccggatgttttcaacatgctgctgcaaatcctagacgacggccgtctgaccgatgcgcacggcaaggtggtcagctttaagaacacgatcatcatcatgacctcgaacatcggcgcgcgcctcatcacggagaagcagcaggagcgcctcggctttgcaaccgccggcgaaacagatgctgcggagcgcgactttgagcgcacgaaagagcttgtgatgggcgagctgaagaaggtgttccgccccgagtttatcaaccgtgtcgacgacatcattgtgttccacaagctcctgcacgaggatatccagagaattgcgggcaagatgctcgagggcctccaagagcagctttccgatatggagatcgcggtggaattcacgccggcggcggtcgaggctgtcgcaaatgccgggtttgatccgatctacggcgcgcgcccgctgcgccgtgcgatccgcagcaagatcgaggatcccgtctccgaaaggatgctggaaggcgtcatgcaggctgggaaatcctatgtctgcgattttaaggacggtcaatatacctttgatgtaaaggaataaaggcataaaaaaaggtgctgccgggatttccgggcggcaccttttgctgtatttgggtcaggaaaagtacgtttcaatgcgcttttcgcactcgggcggcgaataaacgaaggcttccatatggtcgcccgtgaaaaaataggcgggcggctcgggtttatagtcgtaatcgaagcactccacaatgacgagcttcactttcatgcggccgggtaaaatgcttttgatgaacacgctcgcctgctgcccgggctgtacgttctcgcgcagctcggccaggccggcgaggttcggcgttagctcaatgaagatgccgtaggactccacgctgcgcacgatgccggcgaccgtctcgccggtacggaagcgctcggcgttctgcgtccacgtgccgagcagctccttgtggctcagcgtgatccgattttcctccttggcacggatgatcgcgcggatgtccatgcccacggtgaagcgctcgcgcgggtggtcgatccgggagacggagattgcgtcgatcggcagcagagagacgatgccgcagccgatatccgcaaaggcgccgaacggctcgagatgcgtgatgcgtacgtcgatcacgtcgccgcgcgttaggcccgatatgtactgcgcaaggcagcgctcctgtgctctgcggcgggagagcaccgcggtgatccgccccgccgcgtcgcggataaaatcggtgatgataaagcataccggcttattgacgcgcgaaatgatggcgatgtcgcgcacggtgccctcgcggatgccgagcgcgccctcctcgcgcggaatgatgccgcgcatacactttaaatcgacgatcaaattgtgctcgttatcgcaaatgacgctgcgcgcctcgagaatacgcgcgtcccgcattgcgtcggaaagggcggcggcgttcagcatggcggcttggttttcggctctgtcgatcagatggccttccggataaaatttcattgatttcactccttttaactacaatgaactatatgagccgaaaacggcaaacatgcactttcttaaattttcgtgaagcgcggcaaagtgcttgattcctgcacaaaattggtataaaatgaaagacaaacaaagcgatcgtgggtcaaagtgcccacatgaaaggaaaggaacatgaagaaaatcagcatactctgcgcggcgctgctcgcggcggtttcgcttgcagcctgcgcttccggtccgtctgcggcggaaaaggtcatcggcacggagaaaaccgtcgcgatggatgacctcaaagcgtcgtcggcgtcggataaggaaaagatcggctaccagctggaggcgcccgaaaagggcgaggagatctgcgtcctgaaaaccgattacggcgacatcaagatgcgctttttcccgaacgccgcgccgaaggcggtctacaattttaaatcgctcgcgctttccggctactatgacggcttgaagtttcaccgtgtcatcgatgactttatgattcagggcggcgacccggatggcaccggtgccggcggtgagagcatctggggcgaggatttcgaggatgaattccacgagaacctcttgaatatttcgggttccgtctcctgtgcgaaccgcggcgccgatacgaacggcagccagtttttcataaatgcggtggagccggttacaatagactgggatcagtacgacgagatctacagctattataaatcctcgccggagcagttcacgtcgatgtacggcgggacgctcgacatggataaggtgacggacgcgtataaatccctgtacgaggaaaacggcggcaatccccatctcgacggcgcgtattccacggcgggcaccggccacacggtatttgcgcaggtctttgaagggctcgacgtcgtgcagaagatcatgcaggtcgaaacggacgacagtgacatgccggtcgaggatgttgtgatcctctcggcggaaatcgttccgtatgaataaaaaccaaatcaaggaggaatcggctatggcgttggtacatgcgacagcagacacatttgaggctttgatccgggagaataagatcgttctcgtcgacttttttgcgacgtggtgcggcccgtgccggatgatcgctccgctgatcgagcaggtcgccgaggagtatgacggcaaagcggtcgtggcgaaggtcgatatcgacgaggagcaggagctcgcgacgcagtacggcattgagagcatcccgacggtgatcctgttcaaggacggcgagccgatcaacgtggaggtcggcgcgcaccagaaggatttttatgcgaacctgatcgacatgcacctgtgagggaaatgcaatgtatacatttgagcggacggccaagtattacgaaaccgatcaaatggggatagtgcaccattccaattacattcgctggtttgaggaagcccgaattgatctgatggatcaactcgggcttccttacaggaagatggaggaaagcggcgtcctgatccccgtgctcggcgtgagctgtacatataagcatccgatccggttcgatgaaaccattgtgctggagctggagatccaaaattacaccggcgtacggtttgaggtggtctacaccggccgccacaaggaaaccgggcttttgagctgcacgggcgtttcgcagcactgctttacgacgccggaattgaagccggtgcgcctcaagcagcatttcccggcttggcatgaggcatttctgcgcgcttcggcggagaaggcgtaaagccgtgcgtgtgcagcctgctttggctgccggtgcggtaatctaataaaaaacagggacggcaggcaccggatggtgcgtctgccgtccctgttttttgcttgagcgaaagttcttcggatcaaggcgcaaaggaacgggctgcacagctttgccgcgcagcccgttcctctgttttaattatctgccgaaaagccggccgctaaaatcgatttcagcccgttcattcgtgccgcagggcgtcgatcgggttcaggttcgccgccttgaaggaggggagaagcccgaagataatgccgatgatcatcgagaacaccacggcgatcacgatagaggggaagctgatcgcaacgggggcggaggtcatatgcgagatgatctcggcgaggccgatgcccgcgccgacgccgacgatgccgcccatgctcgtgagcacggccgcctctgtcagaaactgccacaggatgcggccctttttcgcgccgattgcctttttcaggccgatctcccgcgtgcgctccgttacggagacgagcatgatgttcataacgccgatgccgccgaccaagagggaaatgctggcgatccagatcagctggctgttcgtggagttgctgaggttctgcagctcttcggcctgcttcaaaagatcctgcgcctgatactggatgccggttgtttccgtgatccgcgcgttcagaatgtcggcgaccgccttgccggcgtccgtcatggcttcggtactggaaacgcggatcgagacgttctgcggctcgtcgaaggaatagatggcgggccacatggcgctcgagacgaacacgcgcgcggcggattggtttgcgtagtaggtgtaatactcctcgatcgagttgatcacgggctcaaactttgaatcctcctccacgatgccgatgaccgtgaagggaagctggttgatctcgatcgtcttgccgatgggatcctcgccgtcgaacagggaatccgctgtgccgctgtcgatcacggcgacggagcggaaggtgctgaaatcgctgtccacaaagctgcgtccgcttttcagcacgaggccgttcgtcgaaaaatagctgttgtccacaccgaagatctgcgcgccggtgatgctgttgttgccgtaatacacgccgctgttgtaatcggtgcggctcgtgtagagcgccgcatcctcgacgtttgccacatcccggatgctctggagcgtttcctccgtgcagaccggaatgcctgtgggcaggccgttgtagaggatctcatactgccattcgccctgatagagctggatctgcacggtgttggtgcccgagccgatcaggtttttcttaatctgctcgttggtgcccttgatggtggagacgatcgagatgatcgaggcgatgccgatgatgatgccgagcatcgtcagaaaggaacgcattttatgcgaccaaatgccctgaaaggaaagacggatattttcgatcattctgccactgcctcctctccgccgagcgcggcgttctcgggcaggttagcccgcgcgccgtcaatggcctgtgcgccgtaggggaaagcgatgtaatcgtccgcggtcagcacgtctcccttgatctcgagatattcgttgtatacggttttgcccgtttggatgtatgtcttgtgcacgcgcttgtcctcaccggctttcagaatgtagcggccgccgtcgtcgctgcggatataggctttcgaaaggtagatggcgtcgctcggggcttcgtcaccggcgccggcctgcaggatgatgtccagcatcatgccgtttttcaggtctgcggcgtccgggatgaaggccgtgaacgcgtagcttgaggtgttcgggttgctcatgccgtcgtagtagctgccctcgctcgggaaatcggagatcttgacgatctccgcctcatagctggcgccgatctcccatgccgatacggaaatcatatcgcccacgttgatgcgcccaagcagggattcgttcagcgtgccggtcacatagaagccgtcgccgccggaaaccacaaggaagggtgtgctggaggcaagcgccgtgtccagatcggtcagcgtctttacggtgccgttgaccgttgcggtgaccgtcgcgtttttgagctccagctccgccttgctgaggtcgagcttggcctgcttgacggcgatctccaaatcgcggatctcctgctttttttccaagatcatccggtcgagctcttcctgcgtgtacatgccgtcgcccgggtcgatcggtgcgacccatgggtcgtccggctcgatgccgagcatttcgatgttgtcctccggcgcttcgaccgcgtcaaagaagaagccggcggagatccgatgcccgtccatggcccagcccttgcgcagcggcagattttcgttatcctcctcgtgcacctcgaagcgcgcggcaaacggaccgttcggaagctcaaatatttcctccggcgcgtccgtggcagatgcgtccggggtgggggaagcgctcgctgtcaggcggcggaaccaagccacgccggagatctcgggcgcagcgctggcttccggctccggtgtcgcagttggctccggcatggccgttggctcgggcgtcgcggtcggctccggggtatctgtcggcttcggatctcccgagctatcaggcgcttcgggagagggagaggccgaaggctctggatcgggtgcagacgtgggcgctgcgctcggctcggcagagggggagggggtcggcgtcagcgtactgagtccgagcagccgcatcagaaattcctttgtgagcacgcagtcctccgtgcacaggaaaacgtacgggtcttcggttgtgcccgtgcccttgaaaggcttcgaatgttcgtcgatttcggaatagagcgttgcctccgattccggcgtgggggtcggcgtcggcacaggctccgggtccggcaccggcggctccacatagggcgcggtgttttgcaggcggaccaagtccttgtttgcctgctgcagctcgtagcttttcttttcaagctcgagcgccttgccctccacagtcagctccagcttcgtcgtgtcgtattgcaggagcgtgtcgccgatcttgaccgactgcccctccttcacaaagatctcggaaatagatttggtcgtatccgggtaaagctcctgcacgaagtcgctcgtcgcggtgccgtaggtgcttgactggtcgccccagtatgaggtggatacgttggaaaccggctgcacgtctacggtggtgttggcctttttgctgttcgtaaagaccgcaataccggtgacgacaagcgccgcagcggcgacgcacgataccgagatgaccgcgatccgctttgcgggggattttgcaccgtacttcataccatcacctccgtttcgggctgtgcggcctgctcggcaaagcggccgtcacggatgtgcagaatgcgctttgcgtggtttgcgacgtcgctgtcgtgtgtgatcatcacgacggtcacgccctcgtcgttgagcgtttggaacagcgccatgatctgctggccggactggctgtccagcgcgccggtcggttcgtcggcaagcaggatcttcgggttgttgacgattgcgcgggcgatcgcaacgcgctggcactggccgccggaaagctggttcggcttaaaatcgacgcggtcgccgaggccgacgcgctcgagtgcgcgcacggcacgctcgcgacgcacctttttcggcacgccggcatagagcagggggagcgccacgttgtccgccgcgctttggcggggcaggagatggaagctctgaaacacaaagccgatcgaattgagccggatttccgagagctttgcctcgctgctgccgatgacgctctcgcccgcgaggctgtacgtgccggttgttggcaggtcgagacagccgatgatgttcatcagcgtcgtcttgcccgagccggatggccccatgatcgcgacgtactctccctcgtcgacggagagggagatgtccttcagaaccggaacttccatcttgccctgcgtgtaggttttgtcgatgttgtgcagctcaaggatcatccgactgcacctccgatcacgacgccgcctccctcagtcgtagcgggcagagcggcggcgtcctcggcgggcgcatccgcttgtgcgccgttgtcctcaggtactgtgttgccgccgtcaccgtcgagcactgcaccgccgttttcgggggttgtaccgccttcctccggcatagcaccgccgttttccggcatatcaccgccctccggcatgaccgtgccgggatcggccgcatacatgccgctgtgcatgttgtctccgggaatggcgatgcggtcgtcctcatcgaggccggagagaatctcgtattcatccgtatcggcgtcatattggccgagggaaagctcgcgcttttcgattcggttctgcgcggtcgccgcccaaacatagctcttgctgccctcggtaaagatgtaatagcccggcagccataggccggtcttgacgagcgtgtcgccgagatcgggctccacatagacgtgctgcccgagcatcaggccgtcaaagctgtccagcagaacgtaaaaattgtatttggaagcgagggtgaaggaatcctcattgccgtaggagacataattgttctggttgttcgagacgggctcgcgctcgatggtgtcgatcttgccgctccatgtcacgctggggtcgacgcgggaggtcaccttgaccggcataccctcgtaaagcgactgaatattcagctcggtcgccgtcgccttgatccggtactggccggtcgagaggattttgatataggcgttcgaggtgtcatcgccatagcccgtgttattctggttaccggaatcgttgatctccttgatcacgccgtccatctcggcgagaacgtcggtgttttcgagcgatttcttgagctgttcgatctccttcgcctttgtggattggtcgtattccgccgtgcggacctcaagctgcgtggactggatctggagcgtataggagagctggtcgtccgaggaggcgttgttcttttcctgctcgaggctgtcgatctgctggttcagcgtggtgatccggttgctgaggctttcgagctggagctcggcctcctgcaattgcagggcaatgtcctccgtatcgtagctgaagagcgggtcgccggccttgacctgctgcccgacggtcacgtgcagctcggcgatcttctttgtgtcgtccttctgcacggaaagcgtcttttccggctcggccacgccggaaaatttcgccgtcatgccgagcccgccctcgccggtgatgtcggaaactgcgttcacataggcgatctcgttcggatcgctcggaacggcagcctgacggaagaagaaaaaccacaccgctgcggcggctaaaataagcgcggcagcagcggcgccgccgatgatccaaatctttttcttcgtcatgaaagtccttcctttctcaatatatatccctgtattgttgttttgcaccaatttcagcagaaagccatatgcaccgggtgcaagtgggacactagacaagcacattatacaatgaaacgcacgcaataacaacttaaataattctgacgaatgcaaaacatttgcaaattttccgccggcagccgagccgcctgccttgacaagcgccggttccgcgatacaataaaggagaacaatcgaaaagggggctgaatcatggaagaattacggattgcggagagcgctgcggagctggtcggcaaaacgccgctgctgcgtgcatcgcgctttgcggctgcggccggtctgcataccgcgccgcttttgaagctcgagtatttaaacccgacgggaagcgccaaggatcgcgcggcgctccgcatgctggaggcggcggaagcggcggggcggcttgcgcccggcgcgacgatcatcgagccgacctcggggaacaccggcatcgcgctggctgcgctggctgccgcgcgcggctacaaggttatccttacgatgccggaaaccatgagcgcggagcgccgcaggctgctcgccgcgtatggtgcggagatcgtcctgacgcccggcacggacggcatgcgcggcgcgatcgaaagagcggaggtgctggcgggtgaaacggaaaacagctttattcccgcgcagtttgaaaacccggcgaatccgctggcgcattatgaaacgaccgggccggaaatctacgcgcagacggcgggcggcgtggatatttttgtcgccggtatcggaaccggcggaacgatcagcggcacggcgcgctttttaaaggcacagaagcccgcggtgcaggtcgttggtatcgagccggcctcgtcgccgctgatcacacagggaagaagcggcgcgcacggcctgcagggaatcggcgcgaattttatccccgcaaattacgacccgcagtgggtggacgccgtgctgactgtgacagaggaagaagcgtttgctatggcgcggcttctggcgcagaccgaaggtgtcctcaacggaatcacggccggtgcggcccttgcggcgtctgtacggctgctgcaaatgccggaaaacgccgggaaaacgcttgtggcggtgctgccggacagcggagaccgctactattccacgccgatttttccgcagcagggataagaaagtcagacatggacgcaaaagcggacggcttcccgaatctaaaggaagccgtccgctttaaaaagatgcgccgggtcagagcgagccggcgcatcttttatattacgcggtatttttaggtgtgttcggcggcagacgctcagtcgccgtaacgcgtgaggatctccgctgttccgtatagctcgtcctccgtgatcgtgcggccccaagcgatcttgcagctttcgtaatcggcattgacctcggtcacgcggacgtagcgggagccgtctgcctgcgtgccggtttccgtcacgagaacggagtgctccaaatcgatgaggcgaatgtgatcgccgacccgcacgcggtcaaaatcgtagtgtatggtgactggcgcctccgtgccgaagagcaggtcgctgagcaggctcgcgtagccgaggcactgcgtgccgtcgctgtattccggaaagtatgcgtcggttttcccggaataagtgttgcaggatgcgtagccctcgacggagtggacacagggcgtgccggtgacacagaacatatcggcatccgcgggggcgccggcacagttccagtacaggccgtcctcaaaatacagcgcgagcgatttcagcttttcgcgcgcctcggcttccgtcttaacgcccttttccgcaagggtcggacgtgcgataacggtagccgtctccgtctgcacggggcggatcaagtccgcatcgatgtagccggtgatctgatccttgacggaaatctccgcgtaagcgccttctgcagcgtcggagagcagagagacatagacattcgcggcgagcctgcccacggccggcgcatcagcctcgggcgcggaaagaacagagacggggctcagggtttcgccgactgcgggcgtttcagtgtccgtcgccgcatggccgcggatgctgagcagcgtgctgtcgcagtatccggttgtgccgtcctcaagcgcgatgcgcgtccagtccgcgctggtgtgctcgagcacctgcactgtgtcgccgtctgcgatctttgcggtcacaacggaaagcgaggaggggccgctgtgcagggcatgtgtattgctctcctccgatgcgaaagccggcagggaggtggagcagagcagaagcgccgccgcaaggctgctcaggtgcatcataaattttgttttgatccgagcgtgcatggggatagcctccgatctctatactatatacaatattattctacaggaatttttgttccgggtcaactgttttcggtgtttttttgtgaaaaatccgcggcatttcacacggttttaagaggcgttgcgaaaaaactgcttgccgggaggctggatcggtggtatactgaggcgtattgtgagaacgcggcgcacaggcaggcggtgtgcagttcagaaacgggggacgaaaattggcgaaaaaatattatgcggtgcgtgcgggccgcgagacgggcatatttgagacatgggaggcgtgccggcggcagacgaccggttttaagggcgcggcctttaagagctttccgacgcgcgcggaggcagaggcatacatgcagggcgccgaaagccttgcatgtgcggaggatttcgcggcggatggcgccgtcgcctatgtggacggcagctatcacagtgggacaaaggtcttttcctgcggcgcggtgctctttttgaacggagaggagctgcatttttccgaaagatttgaggacccgcagctcgccgagatgcacaatgtcgcaggagaaatcaagggcgccgagacgatccttacatactgcatagagcacgaggtgccgagcgtcacgatctgccacgattacgagggagtggcgcggtgggcgaccggcgagtggaaggcgaataagccgggcacgatcgcataccgcgaattctgccggcgggcggccgaacacgtgcgcttccggtttgtcaaggtcaaggggcattccggcgacaaatacaacgacctcgccgaccgccttgcaaaggatgcgctcggcatcccataaaatcaaatcaaaatccaaaaaggaacagaaaaagtcaaaaggaacaggtttcgccctgttcctttttcatttgcgggaaatcagaagaacgcgtggtgcctgcgcagcagcgcctgaatttttgagacgtccgtttccggcagcgccgtgcggtcctgcacggcggctgccgcggcaaggccggccgcctgccccgtgctgcagcaggtgggcatgatgcggaacgaggcctgcgcctcgtggcagccggagatgcaccgcccggcggcgagcagattccgaatgtttttcgggatcaggctgcggtagggaatcgtgtagtacgtgccctccttgaaatagtagtggctcgttcccgtgccctccgggttgtggatgtcgatgtcgtagttgcaggccgcaacggaatcctcgaagtgcacgcagtccttgaggtcggagacagtcagcgtgtagaggccgtcgatcatgcggctttcgcgcacgccgatttccggcgcggaggagagcagcgtgcagttttcaaagcccgcgcagttctctttgaggaaggtgtagagctcgaacatctggcggcgcgcctcgcgttcggcgaagctgagatcgtacaggtcgaacggcgagcgcttgacgatgcgcgtcgaattgaggtggagcacgccgtccgccacatatttgaatttgagcacgtcctcgcgcgggtttttgatcttgcccgccgcgcggaactgcttgtacagcgcattgatcttttcggagttcctaaatgcgagatcgacgtcgacgttggagagccggaaacacagcgtcatcggctggcagagcccgtccgcctcgcggccgacccggtaggcgcagcctgcaagcgcggtcaggtctgcgtcgccggtcgcgtcgataaaataatcggctgtaaaggtcatttcgccgccttttcctataatggtgacggactttacagcgtcgcacacgcgctctgcacgcaggagatatgcgtggaacaggacgtctacgccgctttcctcggtcatctcgtcaaacacgagcttcaggatctcctcgctgaaagtgacgcggttttggtgcaggccgtcctttttgtcgagccggccgaggatctcggtgaagatgccgtcggaaagcgctgtcgttttgccgtcgatcttcgttgtgaaccccataaacgggttgatgtagcagtttccggcggccccgacgagaaaaccgctcttttcgagcaaaagcacctttgcgtcctctcttgcggcggataccgccgccgcgacgccggcaaagccgccgccgactacaatgatatcatatttcatggttgattcctcccgttaaatttccgatcgggcagagccgccggccgaaaagccgtgcggcagcgtgccggatggcctcaatgaaaataagcgccgttttcgcgcagcgcggcgcgcagtctctccgtatccaccgcatgcacatcgcagccgtcggatgcggcggcgaaggcggctgccgtgccggcggcttcgcccatcgcgaggcagaccggcatcacgcgcacagagccctgtatgcgcttgtcgcaggaaatcgagcggcccgcgaccaacacattccggatgccggcgggcagcagcgcgcggtaggggatgccgtgcgattcgcccgggccgtagcgggcgctgcgcttatcttcgtcgatccggccgtccgcgagcaggcgcagctcgtcgagcgtgtagtggatgtcgaggtaatagctgttgcggcagatctcgtcctcaaagtcggcctttgttatgtagtcctcaacggtcagcttgtaatcgccgacgatccggcgcgattcgcgcacgcccatcacgggcgcagtggaaacgaggaaagcattgccgaaagcctcggggaagtagagcgcgagcgcgtcgcggtactgctttgcgatgcggcggccgcgcatcatcgcctccgaaacagatttcgggtcggtggaatcgaggccgaagaggtggccggcgttgaagccgaccgtacccgggccaatgatgttgttgcacaggtgcgtgtcgagaatatccgggaagcgcgcgtcgccgggcagcaggtgtgtaaagctgttcctgttgttcgggtgcatgccgccgctgcgcatgccgtatttcgggtggtacagataggcgtacaggtcaacattcgcgaggctgaagcagagcgtggagggcatcggctcgccgttttcgccgaactcgtagtccgcgccggcccaaaccgcaaggtcgccgtcgccggtgcagtccacatacgttttcgcgctgtaggcggtgaagcccgatttgttggagacgacgatcgcgcggaccgcgccgtcctcagcgtcgacatcgcacaggaatgtgctgaacagaaccgtaacaccgtattcggtcacaagctcgtcgtagacgcgtttgaggccctcggggtcgatcggcacccagtccgcatcgccgggcgccacgtgcggagaaagcgccttggagcgctcgaaaacggtctgcgccataccgcggtagatgatctgctccttgtcggaaaacgggcaccaagcaggcacaaggccggaggtgcccatgccgccgagcgagccggtcgcctcgatcaaaagcgttttcgcgccctcgcgcgccgcggaggccgccgcggtgcagccggcggggccgccgccgaccacgatcacatcgtaggcggtgttgagcgggatagagcgggatttaagcgtgtacatattgaacctcttttcacggtcggattgagcaggcgctcgccgcctgcgtctgccataaagatagcgaagctggcggaaaaaaacaagagccctgaaaagagttcgtaatattttgtacgaaatcgatagatcgcatcaattttcttcgggcgggttcatcgtgcgctcggcgtggatctgcggcgagtcgttgcgcgaatgggggatgcggatcgtaaccgttgtgccggtgaggatcgccgattcgatctggaacgtaaagcggtcgtcgtagtagatgcgcagccgctcgagaatgttgccgatcccgtagccgccgcgctttgtgttcacggcgggcttgtcctttttcgcgagcagttcggccagcttgctcttttccatgccgacgccgttgtcggcgatctggatctgcacgtagctgccgatctgcccggcggtcagccggatgacgcccgcgcggtcgctgagctcgtacagcccgtggaacaggctgttttcgacgatcggctgcaaaatcagcttcatgatcgggtaatcggcgatattcggcgcgacctccgtgacgagccggaccgcgcggccgcggcacaggttcgtcagctccacaaaaaggcgcacatgctccacctcatcgctgagcggcagaaaatccctgccgttattcaggctgagccggtaaaagcgcgcgagctttacgacgatgtcaacggtctcctgattgccgctcgccatcgccttccacgcgatcaggtcgagcgtgttgtatagaaaatgcgggttgatctgcgcctgcagggcgcgcagctccatgtccttgaggtttttgccgaggttgtagcgctcgtcaatcaagaggctgatccggcgcaccatgaagttgaagctgttctgcagctcgccgatctcgtcctcgctgtctacgatgcagctcacgccgaggtcgccgctctccacgcgccgcacctgctcggcgaacgttttgatccggcgggtgctgtagcgggcgtagaggtaggcgaggaaaaaggcgatgacgctgatgacgacggtgagcagaatcatctgattgcgcaggtcggagcttggggagagcaaattgtcgatcgaagcgacggtgaaaatccgccagccctgaaacacgggcgccgaaaggccgaacacggcgtttccggcgatgtgaacgccggaggatgcgccgaattcgtcccgcagccggcagagctgctccgttatatcgtcttcggaaagcggaaatgccgaatttgcgccgcagacgatgcttagattttcgtccacaagataggaggcgctctgtgcggtatagttgttgcgctgcaaaatgccgagcaggtcgctcttgggcacatcgacgctgacgacgccgagaatgcggttaatgtctctgcggcttcggatcagcgtgacgacggaaaggacctcctgcggctctgaaagtggcggctgaaaggtgctcggcggcaggagtgtctgcgtcccgtatttctccacgagcatgcggtaccagtcctcgccggcgacggtgctcagcgggtaggtgatgtagttgctgcggctgtgcgtgaaggaatcgctgatgaacaggcggatctgatagagcccctgcagtgtgcgggtcgattcgatcgccttatacaggtcgttcatgtcgtcgtattcctcgctgaagctgatgccggcatcctgcttttccagcacctcgtgaacctcctctgtctgtgcgaccgaggaggaaacggtcgagatcttatacagctcgtcctccatctcgttttccgcctgctgcaaatagagctgcgcgatcttgatcgactgcgttttgatgatctcggtgctgctgtagcccgcgaataccgtaagcacaatgatcgggataaagatcaggaggaaatatgaggcgaagatcttcatgtgcagcgagcagtttttgtatcgaagggtcaaataagaaagcggcgacatcatcattcctcttccggtgcatgcggagaaaggctgccgtgcttgtttcggtaggcgcgcgggctttccccgaagtattttgtgaacaggcgcgtgaaatagttctggttcgcgtagccgagcgcgtcggcgatctcgccgaatttcatgcccgtctcgcagacgagccggcgcgcctttttcattttggtatccagaataaactggttcagcgtgcggcctgtgttcttcttgtagaggtagcacaggtagttcggcgtgacaaaaacgtgctgggcgatctcgcggatcgagagttccttgccgtagttctgcgtgatgtactgctcgacctcgaggacgatgcggctcttgttgtcgagattcgagatgttgtcgatgtggcgccggagctgagcaagcaggtagcggcgcaccgtgtcgatgtccggcgcaaaatggatgaattcagagatgtacgggctgctgtcctgattgttccacttgctcatctgctggctgagccagaaagcgatggaggcgagcgcctccttgatctgcgggatgtcctgctcccggcaggcggcgatgtcatcgatgtaactgttgagaaagccggtcgcgcgggtaaaatcgttcgcgaggacggtgccgtaaaactcgcgctgcaaatcgggcgcgggcacaaacggcttttggctgagatcgcggaagaagatcacccggccgtagccgagcagaaaggcggcgcgcacggcggcgcgggcctcgtcgtatgcctcgcgcaggtgcgagatgccggcgcacagattgctgatgcccacaacaacgtcggcctgcacgctgtcgagcgtcgtgagcagcggacgcagccggagctccgctgtctggcggatcaggaaatccggggagacgtttgcgtgcaggatgtagcccttgccgacgcacgacatgacgaatcggccctcaaagatctgcgccgcggccttgtgaaacgcgaggtaatggcgcgaggccagaaggcggtcgtcgagctggctgtcgtagccgtggtcggcgatgtgctcgtccgccgcgttcatctgcaaaatcagcgataccatcggcgcgtgcaggtcgaggggcaggtcgggcggcgcgccggtttcgctgtattgcagcaaagagagcgcgagatcggcctcgcgctgcggcaggtgcactttttggctttggcactttttcttcgctttttccacggcgctgatcagctcgtgaagctgcaggggcttgtagaggtaatcgaccgcattgagcttgatcgcgtttttcaggtattccttatcggaataaccgctgagaaacagaacctgcagcgaggggtgcgagggcagcacctcgttgatgagcgcgatgccgtcgagctttggcatgcgcacgtcgcatatgatgatgtcggggtccgtgtcgtgaatcagaaccatggcctccagcccgtcggacgcctcgccgacaatctctatatccatcatctcccagttcacggattcggagatgcctcggcgggtctgctccgaatcatctacaacgatcattttatacatgctcctaccactccccttaaatccaaaaagcacgcgaatcgagctttcttttatgggacaagtatagcagattttagaagaaaattccagaagcggccgcccaaaaatcaagattctttagaggaaatcacagaaagcggcgggaaaattagcaggatattacgattactagcacaaataaaaagcacgggtgaaggagggcggcttggatctgtcggaatctatggaaatttagcacgaaacctcaaaaaagaatcggtgataaatggtaaaaacaaggacgataattcatttatttttggatgtttttggaataaaatgatgctgcaaacaaaagagaccgcagtttgaagcgtctcgaaacaggaaaggacggatactcaaaaatgaaaaagaaaggcggaacgctgaaatacctgcggcagaatttcgatttgtatctgcttttggtgccggcgctggtgtatgtgtttatattccacctgctgccgatgttcggcatcctgatcgcgtttaaggattacaatatgtttcaggtgcccggaaatccattcctttccatactggaaagcccgtgggccggcttcaagtatttcgagcaggtgttcaaaaggccggagtttttgcaggcctttgcaaatacgctgatcatcagcgtgtataagatcgtattcacattcccgctcccgatcatcttcgcgattttcttaaacgaagtgcggagcacgaaattccagaaaggcctgcagctcatcgtctatctgccgcactttctctcgtgggtcgtcatctacggcgttttcgtctcgttccttggctccacgggcgtgatcaattcgatcatcacgggcatggggcttgagcccgtcagttttttgatggacagcggcaaattccgcggcatcctcgtcatcgcagacgcgtggaaggagatcggctggagctcgatcatttatttcgcggcgatcgctggcctcgatcaggaatgctttgaggccgcggatgtggacggcgcgacgcgcatgcagaaaatctggtacatcacggtgccgagtctgctgccgaccatcgtgctgatgctcatcatccgcgtcggcaacattatgaacgccggtttcgaccagatctttgtcttttacaacccgaccgtatacgatgtggcggacatcatcggcacgtacgtctaccgcatgggcctcggcaagctcgagttcagtacgggcacggccgtcgggcttttcaactccgtaatttctatgattttggttctttcctcgaatttcattgcgagaaaggcgaccggaaaggggatttggtaacgcagttaccgggtgaatgcaaatggaaaaagctaaaaaacgcgggcatatatccgtatttgatgttgtcaatgtcacggcgatggttttggtcggcctcatcatgctgctgccgattctgaaccttgtctcaaaggcgttcagcagcgagggcaatgtgatcgccggcaaggtgttgttctggccggttgaatttcagacgggcacgatccaatacgttttgacgacgccggagttcagcagctcgttcttcgttaccgtaacggtcacgatcgtcggcacgctcggcgcaatgcttctgaccgtcatggcggcctatccgctttcgaagccgcatctgaagggccgcaagttcttcctttacatcttcgtctttatcatgctgttcagcgcgggcatggtgccgaactacatcctgttccgcaccttgcagctcacgaacacgatcttcgcgctgattttctccggcatgctctcctcgttcaatttgttcctgatcaagaactatttcgagacgctgcccgaggtcattgaggaggcggcgcgtatcgacggagcctccaacatgcgcgtgttcttcagcgttgtgctgccgatgtccacgccggttctggcgacggtcacgctgtactatgcggttgcatactggagcaactactttgccggcgtcatgtacatcacagacgcctccctgaagcccctgcagcagtatatgttcgaccttgtcacgcaggcgacgagcctgcaggatacgtccggcagtttcagcgacgtgaatcaggcgatgaacgtgtccggcgaaaatatccgcgcggcaacgatcgtcgtttccacaatcccgattttgtgcgtgtacccgttcctgcaaaagtattttgtcaagggcatcacggtgggttctgtcaagggctgatgcggcccgcataccggtatggttcaataggaaactattgcaagcataaatttttcaaagcaaaggagtagaaccatgaagaaactgatcagcctgctgctggtcgccgggatgctcctgtccctggcagcctgcggcggcaccaacacggcggatccgtcctcctcgggctcggagagcagcgcctccggctcgtcgtccgaagccgcaggggacgacccgatcctgaccggcgagaagccggagctcaaggtcctcagcatgtatcaggcatacgactatgaggagcagccggcgtggaagatcaccgaggagctcacgggctacaagacgaagtggtacgcgcttccggccgacaatgcggaccagaagctgctgctggaggtttccagcggcgcggattacgacgtgctgctccggatctccccgaaccagtacgcacagctttcgaagcagaacgcgctgatcgacctctcggggcttctcgaccagtacggcgagaacatcaagaatgcggtcagcgacctcgcgtggaagtccgttacgaatgacgcgggcatcatcaacggcatgccgcacgagaacatggtggcgtcgctcgacaacacctacggcatgctcaccggcggcatcggcgtgcgcagcgatatgctcgaggagctcggcatggagctgccgacgaatctcgaagatttcaccgcatttttagaggccgcgaaggaaaagtacggcattgcgccgctcacggcgaataagaccagcccgttcatgcaggtgctgctcacggcgttcggcatgggcgaggcggaatggtacgatgtggacggcacctacacccacaggatcaagcacccgcagatcgcggcgtatctcgcttacatgcagaagctgtacagcgagggcctgatggacaacgacatgccgatcaacacggcggacaactcgaaggagaagtttgcgagcggcaacgcgatcgcctgtgcgccgctgatgttctgggacattccgtcgatggtcaacgcgctcgcgacgagcaacccggactgcaagatcgaattcgtcacggaccttgcgccggatgcggatacgcagccctcgcactacatcatgaagggcgcgaacttcgtcacctgcatctcgcagaactcgaagaacccggagcatgtcgtcaactggctgaacatcctgaccgaaccggataatttccgcagaacctatatcggcgaggagggcgtctcctatgagatgatcgacggcaactattacccgatcttcgagggcgacgacgcgaccaacttcaacgcctatacgaactccgacaagctctccggcttcagcgacccgctgcttgcgttccagatgtggcaggctagagccagaaagacgccggaaatggccgaggcatacgaggccatgaacgcccgcgtcgaggagtacgagccgctgatctcgatcgaggcgtacggcaagacctccccgcaggtgcaggaatacatcacggcgctgaatcaggcgttctcggattcgttcctgaaggcggttgtcgagggcacagacccggatgaggccgtcgcagcgatgcaggcggactgggatgcaaacggcggactcgaggtagaggctgccatgcaggaattctacgacgccaacaaggattttgcaggctgagtataacaccgaatggaaatgatttccgccttctgccgcgcggcggagggcggaagctcttttggaaaggacggatggagatggatcgactgcacatgcccggcagggaaatccctgtcgcgggcgaatacgacgtcattgtgctcggcggcggcacggcgggcgcttttgccggtatcgcggcggcgcggcgcggcagccgcacgctcgttatcgagcagttcggcgcgctgggcggctcagcgaccgtggggctcgttctgccgctgatggcgacgcacatgccgaattaccggggacactgcccgctgagcgcggagctggtcgagcggctgcgcgccgtcggcggcgtggagaacgacgactactatttcgatacggcgatgatgaaggtcgcgctcgaggacatggcggcggagagcggctgcacgctgctttactacacgatgcttgtggatgcggtgcgcgcgggaagtaatgtgacgcacgtgatcgtcagcaataaagatggcctcacagcctatgcggcaaagtgcttcatcgactgcacgggcgacgccgatctcgcgaaggcggccggcgtgccgtatgaatccggcaaccacaaccgcatcaatcagccggtatccctccgcttcgaaatggccggcatcgattttgaccgattccacgccttcatgcgcggcctcggcaacaacgcgcagaagtatttcgcgatgaatacggcgggcatgcgggagattctcgggcaggcctatgcggacggcgtgctgaccgagcaggacgtctgctattttcaggcatttggtatccccggccgccccgatgcgatgaatttcaactgtccggagctgacgacaaaggagaatgtcgtggacccggtgtttatgacgcagaagcaggtagacggcaaaaaggcgatcctgcgcctgcgcactttcctgcggcgctatattccgggctttgaaaacgcgtatatcacggaaatcgcaccacttgtcggcttccgggaatcgcgccgcatcgtttcggaatacgtgatgacgatccatgacattctgtcctatcggaaattcccggacggtatcgcggcgagccgctaccctgtggacgtgcacggcgaggaggacgtttcgctcggtttgaaatacgacgataccgtgcctgccgcggagcgttactgggaggtgccgttccgcacgatggtcgcaaaagatgcggataacctgcttgttgccgggcgctgcgccggtatggatttccgcgcgcagtctgcggcgcgcatccagcccatatgccgttcgatgggcgaggcggccggcattgcggcggcgcttgccgtaaaagaggggcatatttgcttccgcgagacagacggcacacggatccgcagggagatccgcctgcccgagaagctctgagcaatacggcggataggcatcggcaccgccccgcaaaaataaaagcgcggcgcacacaacggtttcggtttgtgtgcgccgcgtttttctgtacttgcaggaagtatccggattgcttctttggatgtaaaatgaaatgactttacaggcggtgcggccggatcaaaataaagcgccggcgcttttcaaagaattaagctgtcaaaaattgcgtgtagccgtgtaaagtgaaataactttatcccagcgcgacatccagcgtcatcatcagcgcaaagccaatcgccgcgccgatcgtcccgatgttgctgtgcgtaccggcctgcgattccgggatcagctcctccacaacgacatagatcatagcgccggcggcaaaggaaaggatataggggagaatcggtgtgaccagcgcggtcaggaggatggtcgcgatcgcgccgagcggctctacaacaccggaagcggcgccgtataggaacgccctgcgccttgaaagcccgccggagaggagaggcgcggaaacgacggcgccttccgggaaattctggatcgcgatgccgaccgccagcgtcagcgcaccggcggaagtgatcgccgcgccgccctcgagcatgcccgcgagcacgacaccgaccgccatgccctccggaatgttgtgcagcgtgaccgcgagcaccagcatgaaggatttgccgagcccgcacggcttgccctccgggcggtcggagttcaggtgcaggtgggggatgacggtatcaagcagcagcagaaaaccgatgccgagcaaaaatccgatcacggcggggagccatgcgatgccgccggcctgctcctccatctcgatcgcagggatcagaagcgaccagaccgatgccgcgatcatcacgcctgcggcaaagccgagcaggagcttttgcaggcgctggttcatggcgcccttgaggaagaaaacggttgccgcgccgagcagcgtgccgagaaagggcagcgcgatgcagatcagtaccttgaccgtcgcgctcattttgcacgcgcctccgcgcaggcttccttgaagcggtgcatggcggcctcgagcattttcgcgggccctgcaaggttgatgcggatgtatccctcgccgccggcagagaagaaacgcccgtcgttgcagtacagatcgtgcttaatgagcagcttgtgcagcgcatcatcgtcaaggccaagggctttgcagttgatccacatcagataggtgccttcgaggcggctgtacgtgatgccgtggcagctttcatcgataaaccggctgcagaacaggtagttgctccagatcaggtcgatgacttcgcggagccagctctcgcactgcgtgtagccgaggcggcaggcctccataccgagcgccgccgaggcgctgacgtccaacgcatccagaacagcctgaaatttcttgcgcagcgcttcattcgggatgatgatgtttgaggtttgcagcgtcgcgaggttgaaggttttgcttggcgcggtgcacacgatgtaatccgggcagccgttctcgcaggccagcgggaaaaccgtatgctcgtgcccgggcatgatgaggtcgaaatggatctcatcgctcacgacgagaacgccgtgccgcgcgcagatttcgccgattttcgaaagctccgcccggctccagacacggcccgcggggttgtgcgggctgcacaggataaagagcttgttttccggcgcggcgcagagcgcctcgaaacgctcgaaatcgatcgtgtaatactcgcggtcattcaaaagcgggcattccgcgttgacgcggccgttctgccggatcgaaaagccgaacgggccgtacacgggcggcatcgtgatcacgccgtcgcccggctccgtgtaggcgagcaccgccgtgaacagtgcggtgacaacgccgccggtcaggatgatctcctcgggctttaccgcccagccgtggcggcgctgcatccaaccgcacaccgcgtcgtaatacgccttggtcggcgtggtatagcctagaatgtgggtgtcaaggtatgtttttagaccctcgatgatttccggcgggtttttaagctccatatccgcgacggagagcggcacgatgtccgctgcggcgttcgggttattttcgagcatcagatcccatttgagcgagccgcagtttctgcgggaaacgatagtctcgaaatcgtgcttcatagctgtattctcccttgtgcaaaaaatttgtgttatttcgattcggtatcttcgacctccagcgacgtgaacgagaaggttgtgcagtccacgaggccgcggtttgtcaggcgcagttcgggcaggcaggcaagcgggatcagcgccatcgtcatgaacggcgactggatgttgcagccaatctgcttccacgccgtgccgaggttttcgacgagcgcgttcatctcctcggccggcttaggattcatcaggccggcgaggggcagcggcacgcagccgagcaccttgccgttctgcacgatgacttcgccgccgccgcaggcgatcagcgtgttggcggcgagcgccatatccgcgtcgttcgtgccgataacgagcaggttgtgcgcgtcgtgtgcgactgtggaggccatcgcgccgcactgcacgtggaagcccttgacgaagccgacgccgtgcttgccggtcgcattgtgacgctcaaagacgaaggccttcaaaacgtcctgcgccgtgtcgcttttcagctcgccgttttccaccttgagcttcatgtgccgctcgtagtctccgacgcgcacggggatgatctcgatcgcgcgcacagtggccgtatcctttttatcggtgtaaattttgaaggtgtccggcgtgatcgtttcgccgacgtgcatggtgtccattgcccagtccggcagcaccgatttgggcaggccgactgtcagccgcccgttttccgctacggtctcgccgtcgatcagcacgcgcgtgacgttgatgtcgcgttcgttgtcgatcagtacgaggtcggcgcacttgccgggcgtgacagagccgagctcgtcgtccatcttgaagcactgcgcgcagttgagcgtgaccatttgaaccgccgtgacaaagtcgatgccgaaagaaaccgcacggcgcacgatgtggtcgaggtggccttcggaaagcagagtgtgcgggtgcgtatcgtcggagaccatcacagcgtagcgggtatcgacggtgttttccgtgatcgctttcgaaacctcgtgcatgtcgtgccaggcggagccctcgcgcatcatcgcgtacatgccgaggcgcatttttgcgagcgcgtccttagcgcgggtcgattcatggcagcagcgcacgccgctcgcgatgtaggcgttcagcccggcgccggtttccgggatcgaatagtgcccggtcacgatctttccggccttgagcgtttcgccggtgatgccgtgcgccgcctcggcggagccattgatgcccgggaaattcatcatttcaccgaggccgaccgtgtagttgtgctgcatttcggcggcgatgtcctcgggggtgatctcggcgccggaatcctcgaagccgggtacggccggcacgcaggagggcgtggtcagcatcgccttgagcggcgttttggcggcgtcggcagccataaggtcgacgcccttgagcccgagcacgttgcagatttcatgcgggtcgtaatagatgcctgtcgtgccgcgtggcagcaccgcgcgggcgtattcgaccggcgtcagcatcgaggattcgatgtggatgtgcccgtcgagaaagcccggcgcaaggagctggccgccggcctcgatgacctcggtctcggggccgatgcagtgcgtaccgtcgccgacgagcgcgatgcggccgcaggcgatggcaacgtcggtgtggtcgagaatctcgcgggtgcagacgttgacaaggcgtgcgttgcggatcacggtgtccgccggtctgcggcccatcgccacatcggcgagcgtgcgggagcattcccaaagctggtgcttgcagaatttgaacatggttctcatcctttctcatcttatataaacggcatctgtttgacggtgtacgatcagtctttctgtaccggattcttgcagaactcgcgcatgcagcacgccgtgcacttcgggctccttgcggagcacaccgcacggccgtgcagcacggtgcggtggcagaaatcgttgctctcctcgggcgggagtacggcgcgcagatccttttccaccttgagcggcacggtgctctcggtcaggccgaggcggtttgcgatgcggatgcagtgcgtatccgtcacgacggcgggctttttgtagatgtcacccacgacaaggtttgcggtcttgcggccgacgccgggcagcttcgtcagctcctcgacggtatccgggatctcgccgccgtatgtatcgcgcagcacgtggcacatattgaaaatgtccttcgccttcgtcttatacaggccgcaggagcggatcagctcggcgatttcttcctcgctgcccgcgcagaatgcgtcgagcgtcgggaagcgctcgaagagcgctggcgtcacaaggttcacgcgcgcgtccgtgcactgcgcggagaggcgcgtcgcgatcagaagctgcagagggtcggtgtaggtcagcgagcagatcgcgtccggatattcctttttcagcgcctctacagcgagaagcgcgcgctgctttttcgtcatgtttatttcctccgttattccgtttccacaattttggggattcccagatctaaggcaataccgcacagaaaagtaggcgcgatactgccagaagtgatataataagaccatggataaacagatgacaatgtctgcgcttagtgatgagttggcgcaggtacggacaaagaagaaagaatttctagcccagatcgagcggatcgtcccgtggaaggaatggcttacgctgatccagccgtgctattacaaaggagagcgcggcaataaaccctatccactggagaccatgctgcggttgtatctgctgcaaaatctgtatgacctgagtgatgaagcaacagcggcggaggcaatcgacagccgggcattttcagatttctgcggcgttgattccagcaatcaggtgccgaacggagataccattggccgctttcggaacctgctggtgaagaatggactgcaggagaaactgtttgcacaagttgttaccgcgctcactgaacagggccttatcctgaaaaagggaacgatcgtagattccaccattatttccgcgccgtcttccaccaagaacaaggagaaaaagcgggatccggatgcacatcaggtcaagaagggcaacacatggcactttggctataaagcccatgttggggtggataaggacagcggactggtacacacagtggaggcgacaccagctaatgtccatgatgtgacgcagacttcatccctgctgaccggtgaggaagatgtcgtttacggcgacagtggctatcttggagccgggaaccgtgaggacgcgatcgttcggaacaaatccggacgcaagatcaaatacaaaattaaccgacgtccatctcaattaaaaaagctgagcaagagcggccagtatgccgcaaagaaagcagaacacgcaaagtcttctgttcgggcaaaagtagagcacgtattcggtgtcgtcaagaaacagctgcaatttcgaaaaacgcgataccgagggctcgaaaagcagcgagccaaattcaatatcatgttcgcattggcgaatctgcttctggctgacaggccctgcctggcggcttgaagttgtgcgctctcgcgaagaaatgcgccgggaagcctatggtttcctgcctgatgggtgattcgacagcgcttgcctcagcaattgtgcggtgctgccctaaaattcgaacagattcagcccgatctgctcgtcgcggcgccggccgactctgccgtcgatcaaggtgatgatcatctcgcaggtggcgctgatgacggcccggttcaggtggccgccgaacaccgcgccgctttcgtttccggcgctcatgtgcaggtggcagtaaaattcatcgttcatggtgtcgatcgttccggtcagcgacacaatctcaaagctgccggagaagctgttggcgcggtacgcctttttttccacgtcgaacacgccgacggtaaagtcgctgaccgcgccgagcgcctgaatgtgcgccagcttgatctgctcggatagggcgatctgccgtacctgctccagaatttcctcgccggggtccagtcttgcgacgatcacgccgccgaatttcctgtattccatgataatcctcccgcatatttataagttttattctacaccttttgtgttcgattgacaatacctcaaatcggtgatacatttagattcatcaaaaggctgggggaaagaagatgtctgcttttacgctgaaaatgattgcgctcgtgacgatggtgatcgaccacatcggcgccgtgttttttccggagctgccgtggctgcgctatatcgggcggctttcgatgccgatctatgcgttcctgctcgcggagggctaccggaaaacgcggagcttcggccgctatgcgctgcgccttgcgctgttcgccgtgctctccgaggtaccgtacgatcttctgtttcagggaaaggtgctcgaattcagccggcagaacatccttttcacgctgctcaccgcactgctcgtgctgcgccttttggatctctccgctaaaaagcggaacatcttcctgttcatcggcgcgcttcttttggccgcagtcccgtatttcctgcatttcagctatgggatgtacggcgtgctggctgttttgtgcttctttctctttcagaaataccgcggcattgatgcgatcgccttttcggcgcttacgtacgggcgctatctgtacgacggcaatttcacgcaggtatatgccgttgccgccagtatcccgatccttttgtacaacgggaagcgcggcgcgctttcgctcaaatactttttctacacgatctaccctgcgcacctgctccttttgtacgcgatacactacatcctgcagaataacctattgccattttagcaaatcgcgcgtataattaagctatctatttgacgaagggaaggatttgttatgtacggtgatcttctgaatacgatcggctttgtctccgctgcggacccggagctcggcgccgccatggagctcgagctcaagcgccagcgccgcaatctggagctgattgcttccgaaaacatcgtttccccggccgttatggcggcgatgggaacggtgctgacgaataaatacgcggagggctacccggcgcaccgctattacggcggctgcgaggacgtcgacatcgtggaaaacatcgcgcgcgaccgcgcctgcaggctgttcggcgccgagcacgcgaatgtgcagccgcactccggcgcacaggcaaacctcgccgtatatttcgcgctcctcgagccgggcgatacggtgctcggcatgaacctcgccgagggcggccacctgacgcacggctcgccggtcaacatgtccggcgcttactacaatttcgtggcctacggcgttgacccggccacgcatcgcatcgactacgaaaagctgatggagcaggcctgtgcggtcaagccgaagatgatcgtcgccggcgcgagcgcatacccgcgcgcgatcgatttcaaaaagctgcgcgagatcgccgacgcctgcggcgcttacctgatggtcgatatggcgcacatcgcgggccttgtcgccggcggctgccacatgaatcccgtcccgtatgcggacgtcgtgacgaccacgacgcacaaaacgctccgcggcccgcgcggcggcatgatcctgtgccgcgaggaatttgcgaagcggatcgacaaggcgattttcccgggcacgcagggcggcccgctgatgcacatcatcgcggcgaaggcagtctgcctcggtgaggcgctgaagccggagtttaaaacctacgccgagcagaccgtgaaaaacgcgcaggcgctcgcgaagggccttacgaaccgcggcatgaagctcgtttccggcggcaccgacaaccatctgatgcttctcgacctctctgagggcgagctgaccggcaaggagctggagcgccgcctcgacgaggtgtatatcacagcgaacaagaacacgatcccgaatgagcagagaagcccgttcgtcacgagcggcgtgcgcctcggcaccccggctgtcacgacccgcggcctgaaggaggccgatatggacgtgatcgccgaatgtatctggctctgcgcgacggattacgaaaacagcgccgacgcgatccgcgaaaaggtcacggcgcttttgaaggcatacccgctttattaaacattcacggaggtagaacgcatgagagcaccgcttgccgaccgcatccggccgcagacgctcgacgatgtcgtcggccagcgccatcttctgggcgagggcaaggctctgcgccggatcattgaatccggcacgattccgaacatggttttttacgggccctccggcgtcggcaagacgaccgttgcgtccatcatcgcccgcaatacgaatatgcacctgtgcaagctgaacggcacgacggcctccacggcggacatccgggacgtcgtcgcgcaggtcaacacgctgcatgcggcgaacggcgtgctgctctacctcgacgagatccagtatttcaataagaaacagcagcagacgctgctcgagttcatcgaaaacggcagcatcacgctgatcgcctccacaacggagaacccgtacttctatgtgtataacgcgatcctgagccgctcgacggtctttgaattcaagccggtcgaaagggaggatgtcgtccgtgcggtcgagcgcgcgttccgcctgctttccgaggagggcggcacggctgtccgcttggaggagggcgtggcggaatacgtcgcgatggcctgcggcggcgacgtgcgcaaagcgatgaacgccgccgagctctgcacgatcgcggcacaggggggcgcggagcccgtcgtcacgatggagcttgcgcgcgagctgacacagcgcagcgcgctgcgctacgaccgcggcggcgacgagcactacgatatcctatcggcctttcagaaatcgatgcgcggctccgaccccgacgcggcggtgcactatttagcgcggcttttggaggcgggcgatctgccctccgcctgccgccggctgatggtctgcgcgtgcgaggacgtcgggcttgcgtggccgcagatcatcccgatcgtgaaggccgcggtggacgccgcaatgatggtcggcctgccggaggcgcgcatcccgctcgccgacgcggtgatcctcgtcgcgctcgcgccgaaatcaaacagcggcgaggcggcgatcaacgccgcgatggccgatatacaaaggggaaagacgggaggcatcccgcgcacgctgcagaataagcactacgacagcgccgaggtgcagaacaaggggcagttttaccgctatccgcatgatttcccggggcattgggtcgatcagcagtatttgccggatgcgcttttggatgcccggtactacagctttggggagaacaaaaacgagcagtccttcaaggcgtattgggacggcataaaaaagcggagataagcatagactgaagctacagatagatttaaaatgcgcggaggcaaacgtctctgatgcgaaaaggagaaaggatgatgtttcgatgaacccggcggttttaagcaacctgtcgtatggtatgtatgtgatcggcacaaagcgggacgggcagccgaacgcctgcgtggccacctcggttgtgcaggtttcgagcggcacgccggaaaaggtgctcgttacgctcacaaaggatacaaacagctgcgcggcgatctgcgaaaacgggatcttcacgatttccgtgctttccacggagacgccggccagcgtgatcggcgcgctcggccttgtcagcggcaaaaatacggacaagctccggaatatccggcataaggtgctcgttgagggcgtgccggtcgtcaaggaaaacacatgctgctggtttttgtgccgtgtgatccactcgatggacgtggggcaggagatcgttttcgcggcggagatcatcgccggcagcgacgcagccatcggcacgccgatgacgtacgattactaccgccgagagacgcgcggcctttccccggtcggctcgccgacgtatattccgccggaaaagaccttcgataagagcagtggcgagagcttcgtctgctccgtgtgcggctacgtgtacagcgacccgaatttcagctttgaggagctgcgcgacaactggacctgcccggtctgcaagatgccgaaaaaggctttcgtgcgccgtacatatcagcggtaagcgcggaaaagcgggctgaagagggcttcggctgtaaaaaacacagacagaaaagggtctgccgtgcggcagaccctttcgcttcgtccggagcgttcattcgaagctttgcaggcttgtgctcggcagatcgccgaggttgttcgattccgagccgtccggcaggctgcgcaggtattcgctgccgttgcggcttgcgatggccacgccgcggatgccgccctgcttcgcgagcgcgacgccctcggattttgagagcaccgtgccgtctgaaagctggtagccggagattttgccgttgtttcggatcagcttggagatgcttttggcgtccttattcggtacggggttcatgatgttgatgtttgcaggcagattgccgattctcttgctcattttagccattcctttctggttggtgttttctttaccctattgtctcacggtgtattccaaatatgcggccggcacaaaagaggcgtgaaaaattggcgccagcgcattgcaatatccgataaaatacgctataatacaaataacccagcgccgcacggctgcggaagaggcagcggcggcgcagaaaaacaggaggcttccatgaattcgtgtgataaaaagcagcttgaaattacggctgcaaaagtcagacttggaatcatcgaaggtgtttataacgccaaatccggtcatccgggcggatcgctgtctgccgcggacatttttacgtacctctattttaaggaaatgcgcgtcgacccggccaacccgaagtgcccggaccgcgaccgttttgtgctgagcaagggtcactgcgcccccggcctgtacgccgccttggctgagcgcggctatttctccgcggaggagctcaagtcgctgcgccacatcggcgcgatgctgcagggccaccccgatatgaagggcacgccgggtgtggatatgagctccggctcgctcggtcagggcgtttccgcagccgtaggcatggcgcttgcgggaaagctcgacgaaaaggactaccgcgtgtattccctgctcggcgacggcgagatcgaggaggggcaggtctgggaggcggcgatgtttgccgcccacaagaagctcgacaatctctgcctgatcgtcgattcgaacggcctgcagatcgacggcccggtcagcgaggtcgcaggccccgcgccgatcgacaagaagtttgaagcctttggctttgacgtgcagatcatcaacggccactgcttcgacgagctcgaggcggcctttgcgcaagccaagacggtgaaaggcaagccgagtgtgatcatcgcaaagacaacgaagggcaagggcgtttcctttatggaggatcaggtctcctggcacggcaccgcgccgaacaaggaacagtacgatgtcgcaatgcaggagcttaccgctgcattgcaggaactggagggctgctgatatggctgaaatggtaaagaaggctacaagagagagctttggcgaggcggtcacggagctggccgccgaatatcccgatgtcgttgtgctggacgcggaccttgccgcggccacgaaaaccggcatcttcaagaaaaaatatccggaacgcttctttgactgcggcatcgcggagtgcaacatgatcggtgttgcggcgggccttgcgacctgcggaaagatcccgttcgcggcgtcctttgcgatgttctctgcgggcagagcgttcgagcaggtgcgcaactcggtcggctatccgaagctgaacgtcaaggtcgtcggctcccatgcgggcatctccgtcggcgaggacggcgcgacgcaccagtgctgtgaggatatcgccctgatgcgcacgatcccgggcatggtcatcctcaacccgagcgaccactacgagatgaaggcggccgtgcgtgcggcgatcgagcacaagggcccgtgctacatccgtctgggccgcctcgctgtggaaagcatcaacaacggcgacgactaccgtttcgagctcggcaagggcatcacgctctgtgagggtacggacgtcacgatcgttgcgaccggcctgatggttgctgaggcggtcaaggccgcgaaggcgctggaggccgagggcatccgcgcggaggtcatcaacatccacacgatcaagccgcttgacgaggagcttattctcgcgtcggcgaaaaagacaggccgtgtcgtcacggtggaggagcacaacatcatcggcggcctcggcgaggctgtttcggcggtgctttccgagaagtgcccgacgccggtcacacgcatcggcgtcaacgacgtgttcggccactccggcccggccgtcgacctgctcaaggagttcggcctttccgcagagcatatcgctgaagtcgtccgcgagaagctcggcaaataagacgaaatgaaataagctcgagagggcggcagaacacaaggctgccgccctttttgaatagaaagaagcaaaagtttttggtatggaggatttgttgtgtctggaatcaaaagggttcatgtcatttacaaaacgcatctggatatcggctacaccaatatgggacagacggtgctggacagctacgtgcaggagcatatcccgcatgcaatcgatctcgcgctgaaaatcaacacgccggagcacaagaagtttatctggacggtcggttcctttctggtcgattactacaagcgccatgcaacgccggagcagctcgagaagatggacgaggcgatccggctcggctacttccgctggcacgggcttgccgtcacctcacacacggagctgcagtccccggaggtgctggcgtacaacctttcggtcagccggaagctcgaccgtgagtacggcgtgcacacgattgccgcaaagatgacggacgtgccgggccacacgatcgcgctggtgcgcccgctgtccgaagccggcattcgctacctgcacatcggcgtcaacccgtcttcgcgcgtcccgcgtgttccggaggttttccgctggcggcgcgacgggcacgaggtgatcgtccactattccgcgcagtacggtcaggcgatctcgatccccggcttcgatgaggcgctggagtttgcccacacgaacgacaaccgcggtccgcaggatgcggcgcaggtggaggcggagctcgcccgtattcaggcgaagtatccgggcgccgtcgtcgaagcctcgacgctggatgcgtttgccgcttctctggaaaaaatccgcgaccgcctgccggtcgtcgaggaagaaatcgccgacacgtggatccacggcgtcgggtcggacccgtacaaggtctgccgctataaggcgctgtgcgtgctggcgcacgaatggctcgcgtcgggccggctcacggaggacacgccgggctacgcaaacttcatgtgcaacctgatgctgatcgccgagcacacctggggaatggatttcaaaaagtacctcgcggatttcaaaaactggacgaaggcggatttcgaagcggcgcgccgcacggatacgacgacgctcgacctgctcacgaaccgcaacgcctctctggtcggcacgctggaatacgatctcagaaattactgcggcggcaagttctccggctcgtactcgaagtttgaatcgtcgcatgcggagcagcgcggctatctgacggcggcgcttgccgagctgccggaagcgctgcgaaacgaagcacaggccgcgatggatgcgcttgtgccgcagttcgatgcgcgcggcgaagcgattgcgcccggcgtgacgcacaccattgccgggtggcaggtgcgcttcggcggaggcggcgaaatcgcctacctcgcgcagaacgggcacgtctgggtgcgtgacggcgagctgggccgcttgcagtatgaggtctttgacgcgaaggatacgacgctggcgttttaccgttacaaccgcgactttgcccacacgggcggctgggcggaagcggacttctccaagcccggcctcgaaacggccgagaatctgtgccacacctgctgcgcgtttgtgctggagcgtttgatgcagacgggtgacacggtgatcgcgacggttcgcggggacggtgaggctgcggaggaatacggcagcccgcgccgcgcgcagctcatctatacgtttgagcaggatgcggtgcgctaccgcctgcagtggttcgaaaaggacgccaacaagattcccgaggcgctctggctgcacttcgggttcgacgtggaaaacccgaaccgctggaaaatgcagaagctcggccagttgatttccccgctcgacgtggtcgcgggcggcaaccgcaagcagcatgcggtcgagaagctgagctattccggtgcggacggcacggtgacggtcgagtcgctgcatgcgccgcttgtcagcgtcggcagccggaacctctacaacctcgacgacaaaatcgagagcatggaggatggcttctacttcaacctgttcaataaccgctggggcacgaacttcaagatgtggtgttccgacgactgcctgttcgacttcgtgatccgcatcgaaacgaacccgcagatttgacaattccataaaaaaggagcaggcctgcgcttcggttcaggcctgctccttttattgtgcaaaaaatcacgcgaaaagcgggaagctcacagcacgcgctcgtagccgatgcgcggcgcgccgtccgccagataaatggtgccgcagcgtatatagccgtttttttccagcgtgtgctgcatggtggcgttgtctgcgtgtgtgtcgcagcgcagggatggaacgccggccgcgcgggcgaggtccgcacagtaatccatgaatctggaggcggcgcctttgtttttcgcctgcggcgccacggcgatacggtggatgatgccgtagacaggcgcgtctgtccgccagcttccgccgcagatccggtcgtatgtcgcctcgtggccgacatacacggcagccgtggcgatcaccgcgccgttttccacaaggacgcagcctgtgccgttttcaatatcggtgcggacggaatccgcatttgggtagccatcctgccattggtcgatgcccatcgcccgcagcgactgctttgccgccccgtaaatctcgagaatgcgcgaaagatcgccggaatttgcactgcgaataatcatagaaagacttccttttatctgagtggattttacaaagattatacaatagtttaaatacggaatcaagtttgctgtaatattcaatgaaagttggtttgacatctatttgccgacgatttgctctttgagcaggcaggatatcaacggattaattgatatttgtcaagatgctttacttggaaatagaaataaaatattgacagattaagactaatttgataatatagcattaataagtgaattaataataagaaatatttacaaaatagtttattttaagcaataattatcgatctttgttttcggcgtgcaagagaaaatctcgtgagatgaatacacttttatgactgatgcttgatgtggttgagaaatagcgtgaagtaattccaatttgtcaacgaaagaaaaatggatggggtgaattaaaaggaggaaaagttatgaagagaaatcggaaaatatgcgtttttctgctctcagctttcttgattttgaccggctgcgccgaacgaccgtcggcgagctacgcggacggcagcccgcagagcagcagcggggcagaatctccgtcgcaggcagctacgacggaagcccctgtaagcgctgcggaggagtcttcggtggaggaagcggatccaaatgcactgcgcatatgccttgaggcagggaccgaactggcacagagtgacagcgatattcgcgtgcttgaaacactgcttgccagcggtttacgaatggcaggcgggccggaaaatatcgtcttcgactctatcccgtattccggaagcgaacgggagatcgcgctggacaaaatccgtacggacattatggctggcgaagggccggacgtatttgttgtgacagtacagggttcgagttctgtttttccaattccggaaaaggcgatgcaggaggggctttttttgccgttggattcgtatatccagagcgcggcacagtccgattgggataagctgacaccggccgtcatggaggccgggcagacggacgaggggcaggtgcttgttccgatgatttacacgctgccgattacaatttatcgcaaagaggatgtgccggaggcgccgccgctcgggacgacatggcaggaaatgctttccgacgaaacaaatatattgcgcaatgcagcggtcatgacgaataatgtatccggcgggctttcgccgaatatgggatgtaatatgctgtcggtgctcggtaggtttgcagattacgagacgaatgaacttctgttttcggaggaagatttgctgcaatgcgcggaagccatactgactttgagagatgaaattgatcgcgatgatacacttcccgtgtatgcgcagggaatgctttgcggaaatggacaattgacatttgatgaacagagttcggagaaataccctatatgtaaaaacgatttgatgacgatgattccggtttattccatggatggagacgtgacggctactgtagaggcgtatacagggatcaatcgaaacacaaagcatgctgaagaagcctttttcgttgtagattatttgatgcgtgtagacgtacagcagaatttaaaaatgttctatgtgatggggcaagattatggccttcccatacatgaggatgttttgtcggcagaatttccgcagcaaaaaaatggattcttttttacggatgaaaactttgaaacgctctctggcgtgcggcatcaaattacaaatgtctcttttgataatgcgttggtgcgatcgctgaatggcttgtatactaccctgtatcttgattatacatatgaggggaaagagatacccgaacgggcactgaaggatgctgtgcatgagacctacgggacgctgaagcaaatgctcagcgagtaaaaaggacactttgccgaaatgggggagggatggctgcttatgcgcaaaacctaccacgcttatatcttgattgcgccgctgatggcggggtgcgtgcttttctacatcgtcccgtttgccctcattctgcggcactcctttctgcgcggcagcgggcgctcggcgcagtttgtggggctggaaaactatatggaggtcatcggcagcgaggcgttcgcgcgggctttcggcaattccatgctgttcctcgccgtgggcgtgccgcttattatgctggtttcctacctgatcgcgctgcttttgcagcatcaggtggaccggcacaagctgcttaaatccgtctttctgttcccgtacatcatgccggtggccggaacggtcttgctcatcaacctgcttttttcagagagcggccttgcaaacgaggtgcttgcggcgctcgggcttcccgtgcagtcatggcttcgcggcccgcaggcgttttggatcctcattggaatgtacctttggaaaagcaccggctacagtgtgatcttgctccttgcgggacttgtcacgattccgggcgagcaatatgaatcggcggatctggacggcgcctccggcatacagaaattccgctatatcacgacgccgcagatgtggtactccgtgtttttcgccgcgatattttcggtgatcaacgcgttcaagtgcttccgtgaaattttcctgatcggcggggagcaccccgtggatgcgctctacatgctgcaacattttatcaacaacagcttcggcaacctgaattacccgaaggtcgccgtggcttccgtgctgcttcttgtcattatcatcgtgtttttcggtgtgttttacgcctttgtcagcaagaaggaggcattccgcgaatgaaaaagatgcgtgcccttttctccggcgccgtttcgctgctgctggcggtgctctgcgtgctcccgtttgtttacgtgctgctgcgcagcttctggaccggtacgggcgtcaccctccagccatattacgaggtgttcctcggcacgccgcagtatctgttccgcttttggaagagcatggggatggccctctgcatcgccgcggggcagctcctgatttctgtgctggccggctacggctttgcgaagtataggtttcccggcagaagtctgctctttttcttgatgatgattctcatgacgctgcccgtacaggtgatgctgatcccgaactatctcatgctcacgaacctgcgcctgatcgacacgtatgccgcgctgattctgccctccattttcattccgctcggcaccttcatcctcacgcagagctttaaatccatttccgaatccgtgattgacgccgctatgctggacggctgcggcgtgccgcgcgttttggcgctggttgccgccccgatgaacaagagcggcatggtttgcgtctttctgctgtcctttttggatgcttggaatatggtcgagcagccgatcgcgtacctcaaggatttcggacagtacccgatttccgtcgcgctggcgtatacgccgccggccgatacaacagtgcatctcgtctgctgcgttctcgtcgtgctgccggccttgttcctgtttacctacttcaacaaagagcttgtagagggaattgtccttgcggaggtgaaataaatgaagcgcagggtgctgtgtgtgttttctctcctgttctggcttctcaccgtgagcacgttcgtttccgcgcgcgtcgaaaggctgatgacgccgatggttgaaatccaagagatcaacgcgcccctgccggggacgacgatctcggcggatgcgcttttctgcgacgaaacgggcatgcacctgtacacgaccttcgagggcttcggctgggaaaccgggcagcgcgtttatgaggttccggccgggggctacaccctgatgggggagcgggtggaaatcaagaatgccggcggctacatcctttatgcggcgaacaccccggagccgggcgcgcaggtgcagatccgcgaggagccgtatctgtttatggacgacgcgctcgtggcggtctacccgggcggcgttccggcgtacagcatagccgcggacggcatgtttgttgagacgcagacggatacggcgctgctgctcgccgcgcccggcacggattatcccttcatggagaaccgcgtccgcctgtatttgcaggcgccgaaggatccggattactacacgctggggccggacagctcgttttacagcctgaacgatctgtactggtttatgagcaatctgcttttggcggcgctgctgctcgcggttctctttttctccgtggcgatctgggcgcgctgctgtaagctgtcgcgcgatatgaaaaagaaccggcgcctcctgcttgtaaacggcgctttggcggctgccgcactggccggcattcagctgattttgtatgcggtggatctgccgtcgtcgctcctgccgcgcagccggataacggatttcgcgcattacgcggagacgttttccgcgctcttttccgcacttcgtgatctggcgcagaacggaagcgccgcggcggcagacgccattcgctttgcgcagggccgcatggtgctggccgggctgattgtgctggcagggattcttatatctgtggggaaggttgtattcggaagccggctggataagcgccgctcaagaccgaagccgagacacgcggcgtggtgataggcgcccgccgaaggcacagcgcccgcggaattttgacttttccgcaggcgctgaaataatgcttgcctttttttaaaaaagcgtgtataatatttgagcacgagaaaacgtgcgctatagatcaatcaaagagagcaagacggttgagaaaccgtggaatatgcgagcggacaggtctgcgcggcgagacaccgtgaaccatgtcaggcgggggaccgagcagcattaagcggatcgtctggtgcgatgcaggtcgcctgtccgttcacatattccacgaatggccgccttgcttttggtttatggagcgtggggaagggagggtgccgcatgtataaggcgctgtacagaaaataccggccgcagctgttcgccgatgtcgtcggccagccgcaggtgaccgtcacactgaagaacgagctgatggcgggccgcatttcgcacgcctatttgtttacgggctcgcgcggaaccggcaagacgacctgtgcgaagatccttgcaaaggcggtcaactgcctcgacccgcaggacggcgacccgtgcggcgcctgcccggtttgccgcggcttggacgacggctcgatcctcgacgtcgtggagatcgacgccgcgagcaacaacggcgtcgacagcatccgcgcgttgatcgaggagtcgaatttcacgccggcgaacgccaagtaccgcgtctacatcatcgacgaggtgcatatgctttcggttgcggcgttcaacgcgcttttaaagacgctggaggagccgcccgcacacgtgatttttatcctcgcgacaaccgaggtgcacaagctgctgccgacgatcctctcccgctgccagcggtttgacttccggcgcatcgccccggaggacattgccgagcggctcgaactcgtctgcgaaaaggagcacgtggagatcgaccgcgacgctgcaatgctgatcgcggtcacggcggacggcggcatgcgcgatgcgctttccatcctcgaccagtgcatcggccgcagtacgggcacggtcagttatgcgctcgtggcggagacggcggggctcgccggccgcgggcatctggagtcgctcgcacagtgcatccacgagcacgaccgttccggcgcgctcgagaagatcgacgtgctctacaagggttcgaaggatatggggcggctttgcgaggagctggccgggtattttcgcaacctgatgctgatcaaaacgatgaaagatgcgagcgggatcgtcaatgcggtcggcgaggagctggagcgcatgacgaagctcgcggtttccatggacctttcggcgatcctgcacagcttggatgcattccagctcgcgctttccagaatgaaggcggcggataagcggacggagctcgagatgacctttatccggctctgctcaccggaattagatacatcgccggaagcgcttctgcggcgcatcgaggcactggagcggggcggcgggctgcggcgggctgcggtgccgtctccggagccggtggttactgtgccggcgatgccgccggagcttaccgtcaaggccgaagcggcggaaaagcctgcgccgcgcagcggtacggcgtccaccgaggcgctctccgaaaaggcggagccgttcgacgcatggccggacattatcgcggtcatgaaaaattattcgcactccgtggcggctgcgttcaacggctcctcggcctatgtgaacggcgaatatatgctgatcgaggcgccgcagatcgcgttcgatctcttgaagcgggccagccagcgcgataaaatgcgcgaggcgatccagcaggtgacaggctgtgtctacaagctcggcccatataagccgccggcagaagcggtgggcggcagtcaaaagccgcagaatgcgctcgacagctttatccgcgacatgcgggaggcaggcgtcgaaatcgaagaaaaataaatctgaaacaaggggttttgtacgatgaaagcacgtttaccgcagggtatggggggcggcggcgccgcgaatttgcagcagcttgcccgtcaggcacagaagatgcaggagaagatggaggaaatcacagcagagctggaggctaaggaatacaccgctacctccggcggcggggcagtttcggtcaccgtgaccggtaagatggagatcaaggccatcgacatcaagcccgaggtcatcgacccggacgacgcggaaatgctcggcgatctcgtcacggcggcggccaacgaggcgctgcgcgctgcagcggcggaaaaggaagagaagctcggcgcgctttcgggcggcatgagcattccggggatgttctgatatgtccggctatcatgttccgccgctggagcggcttgtcgataaattcgaaagcctgccgagcatcggccataagtctgcgcagcgcattgcgtaccacgtactgggcctcagcagggaggaggcgcagagctttgcgcaggcaatcctcgatgcgcacgagaatatccactactgtgcggtgtgctgcaacctgacggacggggagctttgcccggtctgccgcagcgaaaatcgagataaatcgatcatctgcgttgtcgaggacccgcgcgacgtctttgcactggagcgcacgaatgaattcaacgcgacgtatcatgtgctgcacggcgcgatttctccgctcggcgggattggaccggatcagctcaagatcaaggagcttttgaagcgtgtgcaggacggcacagtgcaggaggtcatcatggcgacgaacccgacggtggagggagaggcgaccgcaatgtatatctcccggcttttaaagccgctcggcatccgtgtgacgcgccttgcttacggcattccggtcggcggcgatctggaatatgcggatgaggtcacgctttcgcgtgcgattgagggccggcaggagctttgatcgacgaaattcggttgacagcgctgcgtttttgtagtatagtgaaatcctgatacacggggaaagcggaggtgagcctgtggcaaaaacagaaaacagaacgattgcgcagaacaaaaaggcttaccacgactactttgtggaggaaagcctcgaggccggcatcgagctcttcggcaccgaggtcaaatccctgcggcaggggcgctgcaacctgaaggatgcgtggtgctccgtcgtggatggggaaatgctcctgaacggctgccatatcagcgcgtacgagcagggaaatatttttaaccgcgatccgatgcgtgtgcgccgcctgctgatgcacaagcgcgagatcatgcggctgctcgggctttcgaaggtgacggggtattccctgatcccgctttcgatgtattttaaaggttctcgcgtcaaggtgcaggtcggtttgtgtaagggtaaaaaactttacgataagcgcgccgacatggctgagcgcgacgccaagcgcgatatggatcgcgcgatcaaggaaagaaacagataaaaagcgggttttccgcttttatatggggatgtaaaggtttcgacgggggttggaagctctggtaagcgagtagcggtgcgggcccgctataaaacctgcaaacttaaaattaaacgacaacaatactgttgctgttgctgcttaattaagcagccgttcttacccgcagtaccgcgggcgggataagagcgtcgattagcggtgaacgtgtacagggttacgcctttacccctgtcacggattaaaggctaccaaagtgcagagcctgccggtcggcgctgcacggcgggaattccaaacgaccggctacactcgtagaaagccccggtaactgactttcggacgcgggttcgactcccgccatctccaccatattaaggaacaatctttaatacaaaaacagccttccaaactggagggctgtttttgtatctatgcccggaaagcctgatattatgggctttccgggctttttctattttccagcggcttggcggaataggccgccatcatctcgccttctattgcggccatcacatagtcccatagcggctcatttttgcacacccttgtccggcccgtatatgccagaaccgaggaaacgctaaaaagtatccctccccagacagagccgcttctttcaaagagaacaatttagcgggaaccttcgcggctcccgctttttctttattcccgctcgaaagcctcaccgcaatccccgcagattacattgacctcccgcgttgcccggataatggtgccgcagcaaggacagacatatttgatactgcggttaatggatttcttactcccgcccttggtggtgccttccactggcaagcgactggcgttgattttgtcctcgcctaaagtttctctgatccatgcctccgcctccggggccagcgttgttactgtccatccgtatttgtcgtgcttctcaatgtgcaagccatgagcctcggcagtagctttgaatttcaggttatgataatagccgttgttgcttacgtcttggatgccatgaaccagattatagaggtgcgccatctcatgcaggagcgtggcggccagttcaaagatagttcggtcaaggtactcagcgcaaagattgatttcccggtatttctcgccgctggcgttccagatttcattgatactgcaccaaccgtaagccccacgccctccgtccggcgatacggtgatggccgggcggttcagctcgtccttataaaaatgctggttgaacaggtcaaacatttcctcggttttctttacgatttcagatatttgcagcatgattgcgtcctccttaaagatatgttttattttctgtgagtgacagcttacacaccaccggtcaaaaggcaagctctaaaggtcttaaaacatatcttttttcactgaggacaggaaaaagcctctcccgagtaattttattgagttaaattacgacttgacatttcctattttttggtatacacttttcatgcaagtatgaaaaatatgaattaaggagatgctgtacaatgtccatgccaaaaggaaagcacatatttggaactgttaaggttggggaacgcggacaaattgtcattccaaaagaagcgcgagaaatatttgacataaatcccggagacacgctactcgttttgggcgatgaggaacaaggaatagctgtagttaaagctgatgtaatgaaagaggttgctgtaaagattttgaaaggtttaggccacttcaaaggaggaaatggtgatgaaactaagtgaaactacgctttccttaccccattttttgccggtgcttttagcattagacttaatcattccattcttgttagctcctttttacaaagattataatcatttgacacaagtaatgagcgttttaggaaattcaaaagcaccgctccatttaatctataatgtttggctggttgtgtttggaattgcaattttaatcagcaccttgcagctttatcctacgatcacacaagtatcaagttttatatccataatgctttctttcgtcattatgctttacgccgtaggcggttgtattctttctggattttttccagttggagaaacaaaaaattttgaaaccctatctgcaaagatacatggctatggatcagtagttggcttcatgcttttgacattggcccccttgttcgttggactacttttcctcaaatcatctaacggattattgggaatttcctctttagtttgctttgttttggcaatagtattttttatattatttgtaatggcagataagtcgaatttccggggaactatcattgctttagaggggttatggcagagactatcccttttaagtatgtatataccaataatgctaatttgctattgcatgtgactgtcgtatgcaatagatgaaactatttatctatcctattcgacgttgctgacaaagaaggccccgccgaagcggagctttcctactttattctgcgattacaaagccttgttctttcaggctttcgatcagcgccggattttccgggccggtcagggttccttctttgtcaacgttatagcttcctactgcgaaagcgtatgtcggcgctctcagatattccggctttgcaccaataaagtcgcctactgcggccaccagctccttgcggcgcacacctgtcacattataggccgcttcgatgccttccggctcatttccctccgtggcaggctcaccgggatcgtccgctggaatttcaccgtcctgcgggctgttctccggcgcggcctctatttccggctcggtagcttccacagccataacctctgtactttcctgtgcggcggctttggctacggctttcgccgctcgacttactctggttcgggcctccgggaatacctccggcaatacaccttcttcatagtggatttcaaaggtgatttttccgtccatgtgtacgttgaaatggaagtcggtcatttccatttcttttagctcgtccggcagctcaatgtttttgtaccgtttcacttccttaccgtttaccataaggcaaaccggaaccgcgtctctcagttttgctgtaatttttcctgttttcattatcatttccacctttcatttttgtgcttgtgccttgtgagtgacagcttacacatcatgggtggaaaagcaaggcttttttgataatatagaaatagtaaatagggaaagtatttcacttacagcaaggcgggccagtttcctgtcaacatgagccagtctgccttgtgtggattgatccgttatgaaaggcttgctttttcccattaagttcagtacactgtcaatctgacacaaagcatttcatactgtttccatattgctttggtataataatgtgaggaggtgtaaaaatggctgttttattgattgtggaagatgatactgccaccaacgaagcaatctgtgaatatatgagatccgcagggcatattaccttgtcggcccttgatggggaacagggtttacagattgcaagggagaaatcggttgatttagtgcttctggatattatgctgccgaagcgaaccggtttggaggtattaaaagaattgcgccaaacaagcaacattcctatcttaatgcttaccgcccttgaagatgagcctactcaggcggccagctttgatgaacaggcggacgattatattacaaagcccttttccatgcttttgctgggaaaacgggtgacggccctgctgcggcggtgtgggaaaagtccggaactgaaacaaatccagatgggcgatattacggtggattttggcggctacactgcttccgggccgggaggccctattgacctgacaccaaaggagatcgacctgctgaaattgctgatagagcataaaggtctggtgcttacacggtcgcagatcttggatgagttgtggggatatgattaccccatcatcgaccgcactattgatacctatatcaaaaatttacggaaaaagctgacccttgaccggattgttacagtaaaaggcgttggctacaagtatgaggaacacccatgaaaaacttaaaactctttactaaaatctttttatacacctttctggtaatgctgtttgttaccgtgatggcccatgtttttctctatgtgcttgcgccgcaaatgaccgtaagcaccaaccgttttgtggaaggggctattattgagagtgctgtgaataccggaatcttgataaaatccgctatcggaaaagcactgccggtatccctgctttgctgcgccatcatatccgccgggtgttccctgttgttttccagagccatgacgaggccaatcaagcagatcgcggaaacaacggaaaagatggaaatgctggataaggctgcagcctgcgtggtgcatacgaaggacgagattggcgaattggccgcccgcgtaaataagctgtatgccagccttctttccaccattgaaaatctggaagaagaaaagaaaaacgtccgtgaggcggaacagtcaaaaattgatttcctgcgggcagcctcccatgaactgaaaacaccggtgactgctcttaacgcgattttggaaaacatgatcttaggcattggaaaatacaaagaccgggatcgctgtctgttggaatgtaaggagattaccgggcagctatcctttatgattaaagaaattttggatacctcccggctggattttacacatgagaaacaagacgcggaaacctttgacctgtcggagcgccttccggcgatctgcgagccttatcagttgattgcgaaggcaaaagaaatcgactttactttcagcatacagggaaagtgccctgtccatacgtcaaagaaaagccttgaaaaaatcctgtccaacctgctctccaatgcggttgcttacacaaagccgggatgcaagattaccgttatattgaacgcccagcagataaaaatagaaaacgagtgtacgcccatcccgcccgataagctggcccatttatttgagccgttctatcgcccggactttgccagagatcgcaaagatggagggaatgggctgggattatatattgtagatacgctttcaaaggcccttgggctgccctatcaatttgaggcgacagaaaacccgtcgggaatgtgctttaccctttatctcccataaagcgattgcttttttatccgtttcatattggttccatattggggtgctatgctgtcagcgttgcaacacttatcctatatgaaacggaggtcattctatgaattttatgaatcgagcgtggctgtacatcgtccgcaagagaggcaagagtatccttctttttgtcattttgctggtgatggcaacctttgtactgaccgctctggcgctgggaaacgcttcgaaagccgcccagcaggagctgcggcaaagccttggcgggagttttcttatcggctttgactacacagagaacaacccctatttgaaggtggaaagcgtggagggcggaaccttgatgtattccacccagcagattagcccggaactggtagagcaaatccgggggcttgaggggatcaaggagtgcagcgccaccgtggaggggctggcggcgttcccctctctggaactgtttaccggcaatatccccattgaggaagaatttcgcgcatcctcaaaaattttaagcacatggaaaagcgaggagcttacccggtttacttccgggcagcttacactgacagaaggtcggcatattctgccagacgacaaaaacaaggggcttatcagcaaggatttggctgagaaaaacggcctgaaaattggtgataaaatccaaacggacaaaggcgtggagattgaaattgtgggcctgttttctccaaaagaaatagaaggtatcaacgatcaggtaacaacctacgataaaatacaaaatctcattatcactgatctcgccactttagtggcttatgaaaacggccctgcaattcagggatttaatgagctgaccgtatccgtagacgatccgcagaacatggaggaaattatttctaaagtaaagggtatctccggtgtggactggaagggattctcttttctggttgacaacgaggactatgagaacgccgcgtcctctttggaacagttatcggagctggtatccaccattttgatgatcgcgctgatggtaagcatcgccatcctctcgctcattctaaccatgtgggccagaacccgcatccatgaaaccggtgtcctgctctcggttgggatcagcaagctgtccatcttagggcagtatattgccgaggttttgctgattgcgatattcgcattttccctctcttatttctccgccagcgccattgcgggccagatgggaaacgtattgcaatccgggcaggcggtaacggaggcgcagcaggaagacggcttatctgccggaacccgtggggaggccggaacagataccggtgatccggaaatcgaaacccctaaattacaggttcgtgtacagcttgaggaaatgggactcctattcctgctggggatcgggattgtaacggtatccgctggaatatcctcgatttccgtcatgaggctgaaaccgcgggaaattctatcgaaaatgagctgagaaaggtggtaacgatatgaaaaaagtatggaaaatgttttccgtcctccttcttgtgggattgctgttcacagggtgtacccccaaggagaataaatcagacgaaacgcaggagcaatccggctcgcccatcatagattacgaggtgccggacaaagtaaaggactatgattttgactatgaatttgtgcccgaaggtgaataggaggtgcccctatgggaattttggaactgcaaaacttaacatactcttatgacaaaaagaggaaggtgttaaaagggatcaatgcgcagatggaggctggaaagctgtatgccattctcggcccgtccggctgcggcaagacaacccttctatccctgctgggcggtctggacaatcctacaagcgggaatatcctgtttgaagggaaggatattgcacaaggcggattggcaggccatcggaaaaagaatgtttcctttatctttcagagctacaacctgattgattatatgaccccgcaggagaatgtccggctgacttcaaagaaaccggcgctcccatttctggaaaggctggggctgacgagggaggaatctaaacggaacgtgttgaaactctccggcggacagcagcaacgggtagccattgcgcgggcactggccagcgaagctccagtgattttggcggacgagcctactggcaatctggacgaagaaactgctcaggatattacagaaatcctgaaagaaagcgcacatcagatgaataaatgtgtggtagtagtcacccactcaaatgagctggcaaaacaggcggatgtggtgttccggctgaaaaaaggcgaactacatatagagcaaagcgggaaatcttcataaattatttttcgaggcaagactactacttgccaaaatgggccagtctgccttgtgcggattggcccatttttgtcgaaggaggaaaactatatgtacgactcttaatctgtactcaaatagatttactcattcaaaaaaatttttcaaattatttttcaaaaactttccggtttacacccctgagatgtgttctggttatgtgaggaggcgaaaaagaaccagctcaaatctgcaggaaggagggatgcggaatgatgtctccctctgactatgaaaaacggatcgtcgccatggtggattccttcaccaagacggtggcccggaatttcagcagaaatctcaaacgggcaaaggccaacgcggagaaacactactctgacgagccagtagactatcttcttgaaactttaagccacgacgacaggtatccgtccgactattttgtgctttatgcggacgagctatcctgcgtggtctatagcgaaattttatataaagcactctgctccctgccggagaagcaacggaaggtcttactctttgacttctggtatgcttggacggatggggaaattgcggacagaatggaggtgacgacacgcactgtctacaacctgagacagcgcgctttcaaggcaatccgagaattttatgagcaaggaagctcagagccatgaattaacctatgacctaatcaagcgagcggttcacggcgatcaaaaggcaatcgaagcatatctccggtactatgattcctatatcaactctctggtaatgtacgatgttacttgcccagatggtcgggtgtattcgtatattgacgaagatatgaaggtacaggtacagatgaagctcgtggacgcattacagaacaaatggaggaaacttatatgatattcatgccagatttgttttccttcgcctacgtcccgaactggtactcccagcttgatatgctggcagagatggccctgccggaaccgtggcgattcaaaaaccctatatacttaacgaaaaatccagatactccgattttggagcggtacattcacgcgatctttaagaaacagttgattgactacaaggacgaaagaaaccccagcagtgcggcagattacttccacattgagaatgaattttgctgcttccatacgggcctttacacccggcgatacaaagccatttatgcctgctttgatcggaataaaaagaaggactccctgctggaatggtatttcagaggctttgcggacgagctgtcgccgatgctccggcacatctccccgctgccaaagaagcccagctactatatgacgcaatatggcgtcaattacaacccggaatggccaatccgcgtcaacgtggagcatatcctcggcgatgcggagaacctttcccgtatcccggcagaaatccgagaagcgcaaaacctgcccctgctcttagaaacggcagttgaattggcgcggcggaaggctgtggtggaaccgagcattgtggttccacaggggtatcagggccgggtacaatacttgctgccgatctgtctgaccgatatggagcagcccgaccttgccatgactctcacgatcatggacgggtattacttggggaatacctgcctcaccttagagatggcgtacctcaacgcgcggcttctttccagaccggtggcgcattggctcacggacattgtggaggaatagctgcgcacagatcgcaggcccgctccccggcagccggatcggctctggcggaaaggggtgcttagacttgcgccgaagcaagaaggaggttgaacaatatgagctgacagatgaacggaagccgatcctctgcccgaaatgcgggcggcggtttatggattccgcaccagataccaaatcacggctgattatcccgaagaagggccggtatcccgattattatgtgaagtgcgggcactgcggcgcagaaatcggggtaataaaaactgaatagcaaacaccgaatgttccgggcaggattccgggacttaccggatagctgcggcaatactacagccctcataaggaatgtatatgaggacgggcaacggacagcgaagccgggaaaccggtgcgcgcgtttgtttgtgcatgatgcgcggaggggcgatttcattccttagatagcggtcaaacctccatgataccacccgaaagatggtggagacgacaccaagcctggcaagcggcacttttgtgctgcttgtcaggctctttttttcgttttagcggccaaggtgccgcctgccgggctccgaaaggagaacggcaaaatgaaagtccggtatgaatttgtaaatggagaaatttctgaaattgaggtggacgacaaccttggggagctgctggtggattttgaccggcaggaatataacaacgaccacaaggaaacccgccgccatacttccctcgacggtatggaatacgaaggcgaggcgttcctctcccctgaaaatacggaggagcaagttttgaagcgggaggatatggcccgcctgctccgggccatggaggcccttaccccggcccagcgggagctggtgcgccgagtctattttgaaaatgagaaaatctcgaagattgcccgtgaagaaggcgtttcccatgtggcaatccatgaccgcctaaagcggatataccagaagattaaaaataatttttaatctgacccttacaatttgtctttcccgtggcctaacagtgagagctacaaaaaccggctctcagaaagaggtgaaaggcaaatgaaacataacttgaaaatctgcattgccagcgggccggaaaccggcggcatagtccgctgtaagacggttcggctgcgcgagcgggtgctgcggcgtttgttcggggatacgcgccgtgtgacgatcatcgtccccggcgacagtgtgcaggcgctgtcggttcaggaggtgccggaggtgggcagccatgattgtgcatgagaatgtccgtccggccctgcctatgccgattaaggcaacgccttaccgacaccaggtcgaagccttcaattttgtctgcggcctgtttggcctgctgccgggaggtgatcgggatggcccaagtgacggtgaaatgcaacctgtgcgggaggagcttccaaaagcccgcccatgaggtgcgccagcacaatttctgctgcgcggctcatgcccgtaagtggaacgctggccgtatgacggaatacaaccgtaccgccaaccccctcaacaaaccgggcggggtggtgtcctcccgcagaaagcaccgggagaagctgtccggccaaggtgccgggaaggcttaccggaaattttacggcagacacgagcatcgcgtggcggcggaagccatgctgggcaggcccctgcggcccggagaagtcgttcatcatcgggacggggacaagctgaacaacgacccgatgaatttagaggtgttgccctctcaggcggagcataccaagacccagtgccgcgatccgcaagggaggtggtgcaaatgaacatttccagtaaaggggctgcgctcctcatggaaatgggttgacccggtacagggaaaacactgactaccatcgccattaccggcgcactttcacagatgggccggattcgccgggtgctgatcgtggccccgctctctatccttggcgtatgggaggaagaatttcagaaatttgctgccttcccgtatgcgctggcggttctttccggcagcagcgccaagaagctggataccctgcggcacatgaacggcaccgccctgcaggtggtggtcgtaaactacgagtccgcatggcggctggaaaaggctttgaccgcatggcaccccgacctgattatcgcggacgagggccacaagatcaaaacccacaatatcgccgccagtaaggccatgcaccggatgggtgcaaaggccagctaccggctcctgctcaccggtacggttatcactaacaaggccattgatgtgttcagccagtataaattcctgaacccggccatttatgggaacagcttctatgctttccgcaatcgttactttgatatggtgggctatgggaaccataccccggttttgaagaaatctatggagagcgagctgacagagaagctccacagcatttcctaccgggcgacgaaggcggaatgtctggatttgccagaaaccaccgatatgatccggcagatagagctggaacctgccgccctgcggatataccggggcctcgttaaagaaagctatgcggaactggccggtggcgaggttacagccaccaacatcctcacccggctactgcggctgtcccagcttaccggcggttttctcggaaatgacgaaaccgctgccgtggagcaggtaagcgcggccaagctctctgctttggaggatattctggacggggctgtggccgaagggaaaaagctggttatcattgcccgctttatcccggaaatcaaagccatctgcaaattgctggaaaagcggggccttgggtattcctgcatcaccggcgaggtgaagaaccgggacgagcaggtggcgcggttccaaaatgagccggaggtcatggcctttgtgggccagattgccacagcggggcttggcattactctgaccgctgcctctaccatggtcttttattccctcgactattccatgtcgaactttgagcagaccaaggcccggatacaccgggtgggccagcggatgccctgcacctatttatatctggtggcccgtggcactgtggatgaaaaggtgctggcggcactggaaagcaaggccgaccttgcgagaacccttgttgacgattaccgcagcgggagaaatccctttgctgcttagatttggaggaacgatggatacagaaaaaatgtttgagctggctgaccggctccgggcgcttcgtgacgagaaggccgaggtcgagcagtacttgaaagaaatcaaggcggaaatggacgaggtggactaccgcctctccgagctgatggccgagagtgaaacgcagaattttacccgctccggaaccatgttctgcctgacgaccaaaacccacgcttccgccgtggcgggccggaaagaggaattgttctccgccctccgcgccgggggcttcggcgaccttgtgtatgaaaccgtcaacgccaacagcctctccgcctttgtcaaggaacaggtggcggaaaacggcgatatgctgccggattggctggatggccttgtcaatgtgtttgagaaaaccaccgtgggcgtgcgcaaggccgcaaagtaaaaatatcaggaggatttatccatgagcgataagaacgaacttatgactacgggcagcggctttctggcccttgccgatttcaatatgaacgagagtatggccgaggagctggaaggcttggagggcggttttgaccgggtgaagatcccgtctggcggtgccaccatgttcgagctgcccggcgacgaggcggacgagccggaaatggtgaaggaattttccgccgtgatcctgcaccatcatccggtcttgcagtattacaaggagaaatataccggaggcagcaacccgcccgattgcggctccttcgatggcgtaaccggggaaggcacacccgggggtgtctgcgcacagtgcccccttaatcagtttggctccggggagaacaacagcaaagcctgcaaaacccggcgcagggtattcctgctgcgggagggcgagctgttcccgctgatcctctccctgcccaccggctcgatgcgggaattttcccgctacatcaagcgcctgctcagtaagggcaaaaagagcaacatggtcgtgacccgcttttctttaaaaaaggccaccaatgccagcggcattgcatactcgcaggcgcaatttaccattgaccgcccgcttaccagcgaggagcaaatcctcattaaccgcctgtccgagcaggtgaagcagtacagccgccgcgtgggctttgataccgaggagcctgccgaggctggcccgctggttgacccggaaaccggcgagatcgtggaacccctgcaataagcactttcgcccagcggagcggggccttcgggcctcctccgctttccgggcagaatggaggaaaaatgagttatacctgtgctttgtcactgaaaaagataaaagactatctggccgaggccgccgtggtcggcttcgactttgaaacctcgcccatcgaggaataccgctcagaggagcgggccgcactggatgcccacaaggctgccattaccggagtgagcctttccgtatccgaggacagcggcatctatatcccgctgcggcaccgggcggggcggaatatccaaaggccggaggcggtcatggactatctgcggcaggccgtatttgagaacgctactgtgataaaggtggcccacaatctggccttcgagtccatgttcctgtatgccttgggggtaatcgtgcagccgccctgctatgataccatcgcggcggcccagcttaccctgaaaaacagcaccgctttccgtggcctgtcggacagcggccttaaaacccttgtgccgcagcttttccatgtggagctgccggattttgaaaccgtaaccgccgggcgcttcttcgacgagcttgacccacaggacaaggaaaccgtccgctatgcctgcgccgacagcgactatgccctgcggctgtatcaccttttcaacggctggttcgatcaatacctgccccggcaccgccgcattgtggagcagatcgagtccccgaccgctgtgtattgcggcctgatgcggtataatggcctgctcatggatcgggccgccatggaagccaagcaggcggaggccgaggaacggatttctgccatccgagaggaaatcgccttcctaatcggcgacgtggagattggggccaatgcctccacctctgcgttcaaaagttatctttataaagaccttggccttccggtggtaaaaaccacggccaagtatcaggaggccgccgacgatgaaaccatgatcctgctggccgcatggtgccgggagaaccgcccggagctgacccggctctttgagctggtgcaggaataccggcgctggggaaaaatcaaaggcacctatctggacggttatcttcggcatatcaacagcgccaccgggcggatacatcccgacctcatgccgctggggacggaaacgggccgctttgccgcccggaacccgaatatgcagaactgcccgcgcaaggacaacgaccccatcggggtgcgctctatgattgtggccccggaaggttgtgtcctgctttcgctggatttttcgcagattgagctgcgcgtcggggccttctactgccgggatgaaaagatgctccaaacctaccggaacggcggcgacatccatgcgcagaccacctcggttatttatcacatcccctttgagcaagcggcagataaaaacacggagcattacaaggagcgccggacgattgctaaaaactgtaattttggcgtatttttcggcctgttccccaagggcctgcaacggacattgaaattcaaagctggcctcgataccccgctggcggaatgtgagaaaatcattgccaatctcaaagccggttatccccagctctctttatggcaggatgtagtaaagcggcaggccaaggtgcgccggtacagtgaaacgtggctgggccgtcgcaggtatctgccgggtatcgtttccgacgattggggcaaaaagagctttgccgagaggtgcgccatgaatacccccatacagggaaccgccgccgacattttgaagctggcccttggccgtctgattgtggaattgccggactattcgtggctgcggcctctgctgcaaatccatgacgagctggtgtttgaactgcccgccgacaaggtggaggaagcggcggctctgatccgttcctgcatggaggcccagcccttcccggaatttgacgtgcctatcgtggcggaggccgcttttgggccgagcttcggggaactggcagaaatggaggtggctcgatgagcgtgaacctgtataatgcggagcggtatctcgatcccaccgcctatgaggccctgatgaatattgaacgggaggccaagcgcaccgcctataaaccgctggtctttatcagctcgccctttgccggaaatattgagcgcaataccagacgggcgcgggatttctgccggtttgcggtatcggagaactgtatccccatcgcgccgcacctgctgttccctcaattcatggaggaaagcgacccggagcagcgccgccttggcatcttcttcggtctggtcttacagagcaagtgcaaggaggtgtgggtgttcggcggcaatatcacaaagggcatggcggtggagattgaaaaggcccatgagcgcggcctgcctgtccggtactttaccgaacgatgcgtggaggtggtacggaaatgaagaaagcactgaatatcccgctggaagaatttctccgccccttcttcgggccgggcgagcgcatctgcctgcggatatttgacgatagaaaaaccggaaccttcaaaggggccaagctggaaacaaccctctccggcctgccaggcctgatggattccctaaaaaagcacaacgagaaaaaccggggcatttattttgtggtgaacttcggaggccatgaagacagcgagatcacccggatcaacgcgcagtttatggagtgcgacgagctgccgctggacgagcagcttaaacagattgaagcgttcccgctggaaccctcgctcattgtgaaaacccggaaatccctgcatacttactggcttatcaaggatggggacgtggcaaccttccgccgggtacaaaagcgcctcgtggctcagtttcatggggacagatcctgcgtcaatgaaagccgggtgcttcgcctgccgggcttctaccattgcaaggaggagccggtcatggtagaatgtattcattttcacccggagcttcgctatacgcaagccgagctggaacaatacctgccgcagatttccgaggaacccgccgcgcctgccgggccagcggccaaagggacgcagcagggcctttctctggtcttgaaacgctgtgacttcatccggcattgccggtacaatggggccaccctcccggaacatgattggtacgccatgattaccaatctggcggtttttgagggcggcgagcgggctatccatgagctgtcggccccgtatccgggctataaggcggcggaaacacaggagaaaatccagcatttccttggaagcggtacaaagcccatcacctgtaaggccattgcggaaaagggctttgtctgcccgaagctggaaaacggtgcgtgtacctgcaaggccccggcggccctgtgctatctgcctttgtcgctggatgaactgcgggaggccctatccgccataccggcgcagaaatccccggtggagaatatgcgatcagcgaaggaatttgtccgggagtccctttataacattgagcctctggatgccgggacattcattgaatacgagctgcgggagcatttccgcctgaaagcggcggataccaaggctctgtccgcctatcaaaaggagctgtacaaggcgtatgccgccaaaaaggaaacccggcaggctgcggaggaaaacggtctgccggagtggtacgaagtaaccgagcgcggcggcctgcggttcctttccggcctgctggcgaaccatctggccgagaatatgcacgccttctatacggccagcagctttttcttctatcagggaggcgtgtaccgggaaagcgaggatatggtggcagcggccaaggtgcgggagctgatgctccccaagagtgcatccatgcaggccatcaatgataccgtgggccagtggaaaatgctcataatgaagccggttcaggaaatcaacagtaacccctttatcctcaatctgcaaaacggtctgtatcataccctcgacaacagttttaaggcccacaccccggaatacttctccacggtgcagctcaaagcggcctatgcgccggatgcaagctgcccgctgtttttgcgctatctggaaagtatgctggccgaggaggaaatccatctcattcaggagatcatgggctacctgctcctgccggtgaacaaggcgcagaaatcctttgtctttgtgggtgcgcccaacgcaggcaaaagcaccctgctcaatgtggtgcaggaaattttgctgggcagcgagaatgtgtccaacatcccgtggcagaaccttggcgaccgcttcaaccgggccgagctgttcggcaagctggcaaatatctttgccgacctgccctccaagagcattgacgacaacggtatgttcaaggcgctcaccggcgaggatttcatcaccgccgagcggaagaacaaagacccgttttccttccgaccttatgcccgtttcctgttttcctgcaatgagattccccgcaactatggggatcgctccgagggcttttaccgcaggctcctcattatccggtttgagaaatccgttcccaaggccaagcgcgaccccaatctggcggaaaagctggccgccgagcgggacggtatcctcatgtgggcgcttaccggcctgaaacgcctgatcgcctccggctatgtgttcagcgaaaccgagcggacgcgggccgagctggaaaaataccggattgaatcaaatagcgttttgtctttcgctaaattgtactgcgtggccgaggaagaaggcgtgacggtacgggacgacctgttcctacgctacaaggaatattgcggcaatgcaggcatgaagccggtatcgcagaccaatttcaacaaagagctggaagccggtttcccggagattaccagaggccgggataagctctccaagcgccggatctggcgcgggatcacctactgcgaaggaggtgtggaggcagattgaccgtttttgtaccgggaaaaccggaaaaaccggggtttcctcattccttgcgcgtaactaccagaggtatgttatgagggctttttttaagaaaaatatatagagtgtggtaaatacccggtaactccggtttttccggcgcatcggttttgccgagatatgctggaaagagaaattgtggccgcgatcctgcggcacctgaaaacgatgccccgctgctttgcatggaaaacccacggcggaatgtacggcacagcgggcatcccggatataatcgcctgcatagatggcaggttttatgctttcgaggtgaagcagcccggcgggcggctcacccggttacaggaagtgacccttgggaaaatcagggccgctggcggcgcggcctatatggtgacttccgtggaagatgtatctgccgccatttctgcggaaggaggttccctatgacggtgaaagaatatcttagccaggcttaccgcatcgaccagcggatcaacagcaagctggaacaggtggcgagcctgcgggccttggcgaccaaggccacctctaccttgtccgacaccccgcccagcgggagccggaatgtgcagtccatggagaatgtcattgtcaaaatcattgatctggaaaacgagattaacgaggacatagatacgctggtggatttgaagcgggaaattgtcggtattatcaaacgaatcgagaacccggagtatcagacgctgttggagctgcggtatctgtgcttctactcgtgggagaaggtggccgtggagatggaatacgacctgcgctatctccacaagctccaccggaaggctttggagcaatgctcggccttcgttccggctgggaaataggcaggcgattgggagggcttcggctctcctttttttcgttttttctgaaagaggacactaaaagacatagaaagacactatggaaatctggtagtattacaatagcaacaaagaaaaatacagcggccttcgcagggtaatctgcggaggctttctttttgcccggaaggaggcggcagcctgtatgccatacaaacccaagcgcccctgttcctatcccggctgcccgcgcttaacctccgggcgctattgcgaggaacaccagaaaatcatcacggcgcattacaacaagcaccagcgcgatccggccagcaagcgccggtatggccgcgcatggaagcggattcgtgaccgctatatcgcagcccacccattgtgcgagcaatgcaagcgggccggtaagattacccctgccgaggaagtccaccatatcctgccgctgtccaaaggcggcacccatgtagaaagcaatctcatggccctatgcaagcggtgccattctgagatcaccgcccgcgagggtggtcggtggggataacctccgggggtaagaaaatctctacgtccggcgcgtcgggcagcgggcgtgggctatcgcgcgaaaaatcgcgctttcaagtggggtatataccccgcaatttcaaagaaaggaggtggcggccatggcaaacggccacggaggcgctcgtatcggcgctggacagaagaaaaaggcgctgtcggaaagaatagtcgagggtaatccggggaaacggaaattgacggtcatggagtttacagataccgccgacctccaaggggaaaagatgccgccgccccgcgactatctggcggcgcggcagaaaaacggaaaagagctgctggcggttgaggtttacaagcgcacatggacgtggctccacgagcggggctgcgcccatttgatacccgctcagattttggagcagtacgccatggcaatctcccgctggatacagtgcgaggaatgtatcaccgagtatggctttctggcaaagcaccctaccacggggaacgccattccctcgccttatgtttccatgagtcagagcttttccaagcaggccaataacctgtggtttcaaatctatcaggtcgtccgggagaattgctccaccgagtacaaaggggccaccccgcacgacgatatgatggagcgcctgctttctgcccggcgcggcggttaaaacataattttattcaggaggtcgtttatgaatatcatacagctccccttgggggagattcacccatacaagaacaatccgcgaaagaatgagggggccgtggatgcggtggcggaaagcatcaagcagtacggctttcttgtccctttggtgatttccgccgactatgaaatcatcaccggccacacccgcttcaaggcggcgaaaaagctgggccttaattccgttccctgcgtcatagccgacgagctgacggaggaacaaatcaaagccttccggctggtggataacaaggtcggcgagctggctgagtgggacgttgacctgctgccgctggaattggcggatattgcgcaggatttgagtcccttcggttttgaaaccatctcggaggacgaatttggagaagaatttacgctggattccggcgagaaaaagccctatcagcagatcagcctgaccctgcacgacaagcaggccgagctgatccttgcctgcattgattacgtccacacccatggcgaggtgaaagaaaccttcggcaatgaaaaccacaagggaaacggagtctatgaggtggtgcgtcaatgggcagagcaaaagaaattagtctgaaagtgatccccggcaaggtggcgaatccctttgtgcgccgccaccattacagcggcactgtggtgaataatagctgcctgcacttcggggtatttctggacgggcggctccatggggttatgtcttacgggccgagcctcaataaatccaaaatcctgccgctggtggcaggcaccggctggaatgaatatctggaattgaaccggatggcctttgacagcgttcttccgcgcaattccgagagccgggccatttccctgagcatccggcttttgaaaaagtacgcgccccatgtgaagtggatcgtgagctttgccgatgcctgctcctgcggtgacggggccatctatcgggccagtaattttgtcctcaccggcattaaggaaaacgaagccatctgcctgttgccggacgggagtaaaatccacaagctgacgctggaatcccggcctaaggctccacgcccggagctgggcgggcgctcctttttcgatgtgacggacggaggctttgcgtggaagaaatacatggaggccgcaggcggcgaattgctgccgggctaccagctccggtatatatacttcatcgacaaatccatgcgcagcaggcttacggtgccggaaatcccttactcccggatcgacgagctgggggctgggatgtataaaggcgaaaaaatcacgatggccgagcgccatgtgggaaaggaggcagacaatgggccgggcaaaagagattgtaatgaaagtgattccgacgaaggtggcgaccccatttatgaaggcccaccattacagcgggaaggttgtgaataacagcaccttacattttggcgtatttctggacgggaaccttcacggggtaatgagctacggccccagcctcgataaatcaaaaatcatcggactggtgaaggataccggctggaatgagtttctggaactgaaccggatggcttttgacagctacctccctcgcaattccgagagccgggccatttccatgagcctgcggctcattaagaaatacgccccgcagatcaagtgggtaatcagctttgcggatgcctgctcctgcggcgacggtacgatctaccgggccagcaattttgtcctaaccggtatcaaggaaaatctgaaccttgcggagctgcccgatggcacccgcgtccataaaatgacactcgccagcaaccctacctcgccccgcaaggagctgggagggcttaccttctttgatgtaacaggcggcacctataacttcaaaaaatatctggactatgtaggagccaccccgatccccggtttccagcttcggtatatctatttcatagataaagataagcgcaaggatttgacggtgccggagattcccttttctaaaatcgacgagctgggcgcgggaatgtataaaggtgaaaaagtcacctttgccgaacgacacagcaaggttacgccggaggaatagcctccggcctttcatgcgcgggtaggctaacggcagaccgcccaccaaccggtgggaagcggcggttcaaccccgtcctccgcgctccaaaaataaggcccttgctttttatgggtgttcagggtaatctgtcgtcacattttgaaagtgagggattttgatatgagcgaaagttatttgaaggttggcagctatacgccggaaaccgaagaacaggaagccgtcattgaccgggaatattaccggcagggctggatattcaaggatgaagaagcctttctccaccacccggaacgggtatgctatgtgccggagctttccgacgaaggatatacccggcagaattttctggatatgtgtaacggacaggaggaagtcgctgccttactctttgaatcggttgattggcaaagcccggaaaccttactgaacgagctgtatgacacatacgagcttgaattttgtccggtctgccagaaaaactatttcatggcgggagaacaaattccctgcccggactgcggctaccagcccgatgaaggagaagaaaatgctgatacagaaagtgagtgccaaccggctgaacccggcggcctataacccgcgccgggatttgaagcccggcgacaaggactatgaaaaactgaaacgctccattgaggagtttggatttgtagagccggtggtctggaatagacgcaccggctttgttgtaggcggccaccagcgtctaaaggtgctgctggatatgggcgaaacagagattgactgcgttgtggtggacttggagctggaaaaggaaaaagctctaaatcttgctctgaaccgtattcagggcgattgggacgaggcgaagctctccgaggtcattgccgagctggacgcttccgcttttgacgtttccttcaccggtttcgacgcggaggaaatcgacgcgctgatgaaccgcttttattccgccgaggccgtacaggatgattttaaccaagaggaagcggcggcggatattgcggcggctggcggtgcaaccacccagccgggcgatctctggcagcttgggagccaccgccttctctgtggaaatgccgcttctgccgaggatatggaatacctctgcggcggcgagcgggctgcttgtggttttgcggctccgcccctgatctctctggccgattaccggaagaatggactggccccatggctggaagggctgggagctgcggttcaaaatctctgccgccatgcggaaattgtctgctggaaaatggacgatctttttaccaccggtacacagtacatggagccggtgggcctttatagcatgaagctctttgaggactgtaatttccgcccgctctggatcagggtgtggaaacggcagggcgcggcggcccgcgtcggttcttctcaccagaacagcaacaaaccgcagaaacagtttgaatatctggcggcctttggggatactgcggaagaaatcaaccagcaggaatatggatgggtgtctgctttcgccgcgcataattaccgctttgtgaaacgccttaccaaagaggagcgccgcaagtggggctatgcgggtgtatgggagatttctgtgccggagcaggccgatggcccgcagccgattcccgtggagctgccttggaggtgtatcaaaatgcactccgatccgggcggcctgatccttgacccattttgcggtggcggcacaacgctgatcgctgccgagcaaagcgggcggcgctgttttgccatggacagcgatcccatgaattgcgatttaaccgtcctgcgctgggagcaatttaccggcgaaaaggcccggcggattaaaaaataagtttgagaattttggcttttgagcttgtcttttggggtgttccagagtaatctccactcacatcaaacgaaggagagaaaaagctatgataaataatcatctcattatggactgtatggaaatgcagcaactcaaggcccgctatgacgaggcaaaggaaaaaggatgctcctctggtatggaggcagcaagggaagcctaccgaaaactttctgaaaagattgaaggccggggaaaaagttacacaaacgtatatcgcctctatgtggatgctgcggaacatgggaacgaatacattgacctgcatgacgtagtttgggataaggatgtggaagctcttatttccagccttagagaaaatgggattgagtatttcactttttcttccacatggtcgagcgcggtacaaaccgcttggctttttaccgagaacggctgtactttggaaggactggttaaaatcaacggccagagcagggctttcggtagtaacgaatatgaaaaaattcccgcctatttatttgccgtacattaacccacagaaagaggcccggaaacgggcttttttcgtccgtgaggcttgtctttttggtggttccagagtaagctcagtccacatcaaacaaaggcaatgccgcaggaggttaaattatgtacgagtataaaatgttagtgacttatcgtgaggaaggaaacggttcatggcagcagaattatgagtatcccgcagcaggaaatcctgacgaagcattgagcattattaaagattcctatgccgaccttgggtatgaagtagaccatgttcgccttatgggtggacggcggatcaagtaaaggggtgtccactatgaaggatattaagaaaatgacctaccgcgagctgaaacaggaagtaatcgccaatcgttgtgaaatgactaccgctaccatcgaaagaaagcgcgagttgatccgccgcaaccatgagctgatggtggaaatggatgcccggtggaacgctgccgaacacaaaagacgcagataaaaatataaaaagcgcccgtcatgggccttttttgtttcgtgaggcttgtctttcgccaccgtccagagtaatctgtgtcacaccaaatacaaggaggttttacactatggcaaagaaaacttttgaaacggttctggaatggaaagacggggaagcctttcgggccaaggtagaggttggaaccgatggctggggccgggtgtttgatacggctgacggcctgtattgcggctccatgaacccgctccgtacccgccagcttatgcaggaggcggcctatgggaagtaagggtgatttacagattgcgctccgcagcctgcgcaatgtgcgccggatggcgcgaagactgcaaagagtgccggttgactgcttgcggataaatagcagcgatactgccgacgcggaatatgtgacggaatggttgggcatcgtcctttgccgggtatgcgggcagccggacgtatccatgccgccctttaaggcgaaggccgctcccgtggtacaattccgctggtttattcaaaaagcggcccggcaggccggtgcgatccggcgagccatccttttgggccagatatccaaagccctgcttgccgagaaagcatgggaaggcctcgacagcgcagaaacattcctcggctccttcctgtccgagaatgtttaccggaaaaggaggcggatgaaatgaggttcccaagaaaagaaatcgtggaggctgtccgcgcccgctaccccaagggaacgcgggtggagctggttttcatggacgacccatacagccgattaaagcccggcgaccgggggacggtggaatttgtggacgacatagccacggttcatgtaaaatgggattgtggttccaggctgggcgtggcctatggtgcggataaaatccgcatcttggaagtcggtgattttgaatgagcgggatcttccataaggggcgctggtatgaaaacacggatatgatctgccgccgctgtggcaggccagtttatccctcagacattccagagtacagttatcaatgctttcattgtgatgaagatttctattccattgaggtggaggaacaggacgcattttatctgccgcctgtcatggtggctcgtccggtgaacgggatcacgcttaacgaggcgttggaatacctgctggatgataccggcaaaacccggatttttcaaaatcagcccgaggcggaggcgtttcttttatgccacggcttcacctccgaggatttggaacatttttattttgtggaggtgccagaaaatgaagaataaaggatgcgcttttgagatacaaggtggcgggatttcccgctattttaccagccctttggtacatggtttctcggattttgttcgctttctcgatgaaaaccggggtgaagcgggacatgcgcctctgccgctgcacaagcggataccgcagaccgcacagatttccgaggcggaatggcggaacatcgccgacaatcaggacaccggctattcctgtttcatcgtggtaaatggctctgaaaatcaggtgtgggtcaacgaggacaccggggccgggatggcgctctattgcttcccgttccttgcggtgatggaggtcgcagcttccggcgctgctgatccgtgggaaaagttacttgcgaaatatccaacagcgcggataggctggtgatataatgcgcagagaacactggcaatggctggctcggaatctgaacgcggtaaatgcggcgtttgaaacagacttctctcttgaaaccgcagaaagccgcgaacatgcagagcaatgccttgacatatacgattccgaggatgctttcaatgatgattttgagggagtctatctgcgccgggagtgtgcgtttgaaatcctgagcggagaaggctatgcggcacagattgacgggaaatacatttatttcatagcactgaattattaagaaaaaggcccggaaacgggcttttttcgtcgagaagccttgtcttttagggtgttccagagtaagctctgccacaccaaatacaaggaggatttcaatatgatagacctgcgcaactataaagacctgatccgggaactggtggcaaaggaaaacgacaaggataaaaactggcagtggtcggttaagagcattaacaagaaccgcgtccgtatccgctgggggtatctggactacttagaggagaaagaaaactgcttcctgatcgaactggattcctctatagagagtatggaatggctccacgcccgcagaccggacggagaaatcattgagtgctatctggttgtggagggcaagcccaacccgcgagttggcgcagaacaaacgattcagagcggccttcgggacgctatatgggaaatcgcgtatatcgcccattcctgttattaaaaacatatcgtcaaaagctcggaaaaccgggctttttttgttggtgagccttgctttttcaggtgttccagagtaatctctgtccacatcaaacgaaggaggtttcaccatgaaacaaacagacgcaatgaagcaggcggccttcgagggccttatgcgggagcatggcttccagtacctcggagcgactacctacgacggaaattttatctaccagcgcacttggcgccggacggataacgtggctttctatggccctatggaaagcacctataaaatcacggcatatatcagctacggggtgccaatcatccagctctttcaggatggccgcgcacttggcacccgtgactattccagcccaaagcgggccatgaacgcaatcaaagaaattatccggtgcgccgggtatgaaatgtaaggagggcggctatgagtaattttagagaagaatatgaaaaaaaatatggccctatgcgggcggccagaaagccggtatcccccaagctacatgatacgttggtggctctttgtcagcgtaactgctggctgaaacgacatggccttgcctttatggacgatccgtgtttggaggaggacagcccctataccttttatgagtatgaggacattgccatgttgaagttattctttgagcatggcaactggagcatccggcagggtgtggtgtatcaggatttattcttctgcaatcaggtgaacggcggggatgaatggtgggtgtgccggtatgatccggcagcaggagcctatttcccttttgaaagtgtcaccatgaaactggtgattgcaagcggtaaatttaaaaccctgcttgctgatatgcaggctgccacagtagagcaatgtaagcggttggattatgcaggaaggagtaagggccatgaataaggattttttaagctggctcggccaaacggaaaagaatgcctgtatgatccagagcgcaggcatgacctactattttgtgcgtgtagcaaaaagcgaggtgttcgattacctctactgccagcggcaatactccggcaaggaactggcccgtggcggcacgttcaaatatgccggtatcttttgccggaaggatggcgagctgtatgacgcacaatatgatgtgcagggcttggccggtgaggatacacaggagcgtagcgcaggccagttgcgggaaaatttgcgacaggctgtccagcggttagtcgaggccgctgttgccaacgacaggcgtaaccttcaaatcgcggagctatccgacccggagctgcttcggaaactgaaaaatgaacaggactattatgcaaagagtaaggctcgagagcgttttctggacgctgcggaatatgagcctccctcattccagtgcttctatgaagcggaaaactggacggaggactctttgctttcctatattttagacccacagggctatgccgccaaagaagccacagattacatggagggcaatcaggaagaaatgctctttgacttcctctgcaatgacgtggaactggcggaatatcaggcgcttgtggacgataggaacaacccggtacatatcgtcaagaaaatcatggccgccataaataccacctctgccaagacggtaaacgtcaccatttgcaaggatggcgaggaattttccttcaagacggaggcgcaggagctgcgccgcgattgtaagaactattacagcacttggaatatcgtggcggcagatcggcggaaattcgaggagcggttcggcaggcacgcagaatactacccgcaggagattatccgcatcacctatgccagagcggttctatacgaagcagggaaatagaaccggcacttgaaacttaaaaattatttttaagggactttccccatatcggggaaggttcctttttttgttgccgtgagaaaggaggcgacggatatacgcaaattaaagaaatataagcccacccgcttcatggcggaaggttcggcctataaccgggagctggctgatctggctgtttcctttatcggctgcctgaaacataccaaaggcgagtggtacggacaaaactttgaactcattgactggcaggagcaaatcatccgggacttgttcggcatcgtgaagcccaacggctaccgccagtttaataccgcatacatcgagattgccaagaaacagggaaaatccgaactggccgctgcggtggctctgttgcttacttgcggcgacatggaatacggcggcgaggtttatggctgcgcttctgatcggcagcaggcttccatcgtattcgatgtggcctgcggtatggtggagcaatgcccggccctcaaatcccgcatcaagccggtgttgtcgcagaaacgcctgatctataagccgctggggagcttctatcaggtactttccgcagaggcatacaccaagcatggcctcaacgtccatgcggtggtatttgacgagctgcacgcccagccaaaccggcagctctatgatgttatgacccacggctccggcgacgccagaaagcagcccctttatttcctcattaccacggcggggaacgatccccactcgatctgctatgaggtacaccaaaaggcgcaggatattctggacgggcggaaaattgaccccaccttttatccggtgatctatggtgcggatgaaggcgacgattggacttccccggaggtgtggaaaaaagccaacccttccatcgggatcacggtggatattgaaaaaatacaggcggcctgcgaaagcgccaagcagaacccggcagaggaaaacctgttccggcagcttcggctttgccaatgggtaaagcagtctgtacgctggatgcccatggaaaagtgggacaaatgtgcttttgcggtagacccggaggcgctgcgggggcgggtatgctacggcggcctcgatctgtcctccaccacagatattaccgcttttgttctggtctttcccccggaatacgaaggcgacaagtatatgatactgcccttcttttggattcctgaggataacctcgacctgcgggtgcgccgggatcacgtcccctatgatgtgtgggagaagcaggggtatctgaaaactaccgagggcaacgtcgtccattatgggtttattgagtcctttatcgacgagctgggcgcaaagtataacatccgggagattgcctttgaccgctggggcgcgacgcagatggtgcagaacttggagggcctcggctttacggtggttcccttcgggcagggctttaaggatatgtccccgcccaccaaggagctgatgcgcctgacattggacgaacagctcgcccatggcggccacccggttctgcgctggatgatggataacattcacgtccgcaccgatccggcggggaatgtaaaaccggataaggagaaatcaacagaaaagattgacggcgcggtggcgaccattatggcgcttgaccgggccattcgaggcggcggggataccggggcctctatttacgatgaaagggggcttttactgctatgagtattttcagccgattttttcaggcgagggataagccgggcgatctgcgccgggcgcaggataccttgggcgggagccggttttcctttttcttcggcagctctaccagcggcaagccggtgaatgaaaggacggctatgcaaatgaccgctgtctattcctgcgtccgtattctttctgaggcggtggctggcctgccgcttcatgtttaccgctacggcaaggacgggagcaaggaaaaagccctcgaccatccgctttacctgctgctccatgacgaacccaacccggaaatgacttcctttaccttccgggaaacgcttatgagccacctgctgttgtatggcaatgcttacgcgcagatcatccgcaacggcaaaggcgaggttgtggggctttatcctttaatgccgacgaaaatgacggttgaccgggacagcaggggccagctctattacctctatacgcgcggctcggacgattcgccggtggatgatgaaaacgggcaggtctatctgccgccggagcaggtgcttcatatccccggccttggttacgacgggatcgttggctattctcccatagcgatggcaaagaacgcggtgggtatggctatcgcctatgaggaatatggcgcgaaatttttcgccaacgacgcggctccgggcggtgtgctggaacatcccggtgtattgaaaaacccggataaggtgcgggaaagctggaacaaactctttcgcggcagtgcaaattcccaccagatcgcggtcttggaggagggcttgaaatatcagcctatcggtatttccccggagcaggcgcaatttctcgacacccggaaattccagatcaacgagatcgcccgtattttccgggtgccgccccacatggtcggggatttggagaaatccagcttttccaacattgagcagcaatcgctggaatttgtcaagtacaccttggagccttggctgatccgatgggaacagagcatggcccgccgcctgttttccgacagcgaaaagaaggagtattttatccggcacaatgtagagggactgctgcggggcgattatgccagccggatgaacggttatgcagtggcccgacagaatggctggatgagcgcaaacgatataagagagctggaaaaccttgaccggattccgccggagctgggtggcgacctctatctggtaaacggctccatgacgaaactcagtgatgcgggggcctttgccaaaaccgcagaaacaaatccaacagaaacggaggaacagacaagtgaataaattctggaactgggtgcgggattccgaggacgggagccgcactctttaccttaacggcaccattgccgaggaaagctggtttgacgacgacgtaaccccggcagccttcaaagcggagcttttggctggcgagggggatattaccatctggatcaactcgccgggcggcgattgcgtggcggcctctcagatttacagtatgctcatggactacaagggtgcggtcacggtcaaaattgacgggatcgccgccagcgcggccagcgtcattgccatggcgggaacctcggttctcatggcccccactgctttaatgatggtgcataacccgctgactgtggcgattggcgacacggaggaaatgcagaaggctatcgccatgctggatgaagtaaaggagtcaattatcaatgcgtatgagatcaaaacggggctgtcgagggcgaagctctcacacctcatggatgcggaaacatggctgtccgcccacaaagccgtggagcttggctttgcggacgacctcctgtttgccgagaaggaagaaccgcttcctgaaccggagagctatgcgttctcgcggcgggcggtgacaaaccggctgttaaataagctgccccatacgaaaaccgaacagaaacaacctgccgagccgctgtaccagcggcttaatttattgaaattttaaggaggacttcattatgaacaagattttggaactgcgtgagaaaagggctaaggcgtgggaagctgctaaggcttttctggataccaagcgcggggccgatggcctgctggccgctgaggatgtggccgcctatgaaaagatggaagccgatgtagtaaacctcggcaaagagattgatcgcttggagcgacaggccgcgctggacgcggagctttccaaaccggtcaataccccgctgacgggcaagcctgcggctccttccggtgaggaaaagacaggccgggcctctgcggaatactgccgctccttttggaacgctatgaggagcaagatgccctcccacgaaattttgaacgccctgcagattggtacggattctgagggcggctatctggtgccggatgaatttgagcgcacgcttgttgaggcattggaggagcagaacattttccgtaccctggctcatgttatccagaccagctccggcgaccgtaaaatcccggtggtggcttctaagggtacagcttcgtgggtagacgaggagggaaatatcccggagagcgacgacgcattttctcaggtttccatcggggcctacaagctgggaacgctggtgaaggtttccgaggaactgctgaacgacagcgtttttgacttggaggcgtatatctcccgcgaatttgctcgccggatcggcaataaggaggaggaagccttctttaccggcgacggcaccggaaagccgctgggggttctggccgcaacgggcggcgcagagattggcgtaaccgccgcttctgccacagccttcacggcggacgaggtgtttgacctgttctattccctgaaagctccttaccggaaaaatgcggtattcctgatgaacgattcctcggtcaaagcccttagaaagctcaaagacggaaacggccagtatctgtggcagccttcgcttaccgcaggcaccccggatatgctgctgggccgcccggtctacacctcggcctatatgcctgccatggcggccagtgcaaaatccgtcctgtttggcgatctctcttattattgggtggcggatcggcagggacgttccttccgccgtcttggcgagctgtacgctactaccgggcaggttggctttttagctacccagcgggtagatggcaagctgatccttcccgaagccgtgaaggtattgcagcagaagtctgcgtaaggagggcggcgtatgagctataacgcaaagaattacatggaacagggcggcgatagatgggtgatcggtggtactctcgaaatcaaagagggtgcctctgtcaccggcctgcctgccgctgaggttcccaaagcagcgaatcaagcgaatagcgtggcggaggatgtagccacacttgtttctgattttaacggcctgctcgccaagttgaaggcggcgggccttatgtctgccgattgataagggggtggcggtatggaggaattgcttcaaaaggtcaaagacaacctgatcctttcccatgacgaggacgacgagcttctgcggggctatatcgcggcagccgtttcctatgcggaaagttaccagcatatccctgccgggcattatgcagacaatcccatgccgcctaccacagaacaagcggttatcatgctgtcttcccacttttacgaaagccgggatggcagcaccggcggctttttctctgataatacgcaggccagcgggcaggtatggaatacggtcaatctgcttttacgtcttgaccgggaatggcaggtgtagcttatgagctttggaaaaatgcgtaccccggtacaaatcctctccacagaggcggtcaaggatgccgagggtttttctaccccgcaggacattgtgctggcaaacgtgcgggcctaccatgaggcccggcatggcagcgagcgatgggcgaatcgggcggccttctcagaggcaaccgacctgttccgcttccgggccattcccggtgtggaaatctccacaaagctgtttttgctctgcgagggctaccggtatgacattaccagtgtggaggatgtaaaggggcgcgggatgtatgtggaaattttagcgaaaaaggtggtggcttcttgtggagcgtaagcgaacggggctccccgcaaagtcgcagggctttgtggggaaaaggagccgcaacggattgagtgagctttcgcatttatgcggaagcgagggataaggagtgtgtggcgacgtggctaaggtacaggtaaaaatgccggaggattttcttttgaaactctcccggctgggagataaaacggacgagattattccaaaggttctggaagctggcggtgaggttgtggtggagaaggtgcgttccaacttacaggcagtcattggccgcgataccaaagaggagtcccgctccaccggcgagctggtgtctgcgctgggtgtttccccggcgaagattgatcgggaaggcaactataacgtgaaggtgggttttgccgagccgcgttccgatggccggagcaatgccatgatcgccaacgtgctggaatatggcaagagcggacagcctgcaaagcctttcttaaagcccgcccgcaccgcctcccgcgctccctgcattgcggccatgaagcagaagtttgagcaggaggtggggaaaatttgagcttattggaagatttgaacgcctgcctgctcccattggggattcccatagaaaccggcattttcagcgataccccgccggacgaatatctggtgattacaccccttggggacagcttcggcctccatgcggataatactccgctctatgacatacaggaggcccggctgtcctatttcaacaagggaaactacaccaaacaaaaaaacgcgatgatccgcgccctgctgggtgcggattttacgattacagaccggcggtatatcggccatgaggacgacaccggttttcatcactacgccatagacgtggcgaaatattacggaatggaggattgaatacatggcgacgattgggcttgacaagctgttttacgctccgattacggagggcgagaacggcgacgaagaatacggaaccccggtcatgctggcaaaggcgatgaccgcggagctttcgattgagctgaacgaggccacgctgtatgcggacgacggcgcggcggaaatcgtaaaggaatttaagagcggcaccctttcccttggcgtggacgatattggcgtggccgccgccgaggcccttaccggggcaaagattgacgcaaacggtgttttgatttcttccagcgagaatgatggcgcaccggtggcagtaggcttccgcgcccgcaaggcaaacggcacttaccgatatttctggctctaccgggtgaaatttgcggtgccttccaccaacctgacgaccaaaggagattctatcgagttttccaccccgacgattgaggggacggtcatgcgccgcaataagctggacggaaagaacgaacacccttggaaagccgaagtcaacgaggatgatacagcggtggaatccagtgttatcaccggctggtacacggaggtttatgagcctgactatacagaggaggttgcatgatggagcaaaatgaacgcgccgccgctattcagattggcggagaaacttatgaactgctgctgacgaccagagccaccaaggagatcgccaagagatacggcgggctggaaaatctcggcaccaagctgatgaaatcggaaaattttgagatggcgctggatgaaatcatctggctgatcgctctcatggcaaatcagagcgttttggtttataacctgcgccacaaggaggagccgaggcctctgctcactgaggaggaggtggagcttttgacttctcccttagagctggcgacctataaggacgcaatcatggaggccatgttccggggaacgaagcgccatgtggaaagcgaggccgatccaaaaaacgtgccggtcgggtaagtgacgaggagttatttacccgactgatttattatgcaacggttcccctgcgccgttccgaggaggaggcgtggcttatgcccttcggatatttgctggatttgtgggagtgtcacaagcagtttaacggaatcagcaagccgaagcgggagctatttatcgacgacattatcccggctgggatttaagactgttttcgccggagggaggtggtatctgtggcggacaactttgggctgaaaatcggtgtggaaggtgaaaaagaatttaagaaggcccttgcggaaatcaatcagacctttaaagtgctgggttcagaaatgaaccttgtggcctcgcagtttgataagcaagacaaatccgtggaggccctttccgcccggaaccgcgtcctcaatcaagaaattgatacccagcggcagaaaatcagcaccttacagcaggcgcttcaaaatgccacaaattccttcggggaaaatgaccggcgcacaaagcaatggcagacgcagcttaataatgcgcaggcagccctgaacgacatggagcgggagctttcgcagaacgagcgggccattgacgagctgggggatgaacttcaacaatccggcaatcaggcggacgactttggggatgaactgaaagacgcggccaaggatgcggatactgcctcctccaagtttgataaggtcggctcagttgtcaagggcatgggtgtggcgattggcgcgtcggtagttgctgcgggcgctgcccttgccgggctgacggcgagctttctcggtcttgcggagtctacacgggaataccgggaggatcaggccaagctggacgcagcctttattactgccggttttaccaccgagcaggccggtgaagcctataagtctttttattccattcttggcgaggaagatcgaagcgtggaagcggtcaatcaccttgccaagctgtgcggcaccgaggaggaactggcccagtggacggacattgccgctggcgtatgggcgacctttggtgacagccttcccattgaaggcttgaccgaggcggcaaatgaaaccgccaagacaggccagatcaccggttcccttgccgatgcgctgaactgggccggtgtttccgaggacgcttttcaggcttctttggattcctgcaacagcgagcaggaacgggcggctctcattaccgataccttaaacgggttgtatgaggaggctgcggagaattacaaagagcttaacggtgatgtaatggaggcccagcgggcgcaggcggaattgacagacgcttacgcagcattgggagccattgcggaaccgattatgacaacgctgaaattcatggcggcagacgtactcaccgccatgctcccctttgtggctctcatgggcgaaggcttgcagggggttctggaaggtacggctggctcggcggaaaccttcgcgcagggcctgagcggtctggtcgaggttctgctggaaaaggtatccgccattgttcccgttatcgggcaggcgatacttgccagcctccccgctctgctgaacgcaggcgtggatattattgtggctctggcaaacggaattgtggcggccatgccgcagattgcaagcgcggcggtcacgatcattttggaattgacaaacggcctgttagccctgctgccgcagcttattgaggcggcggcacaaatgatcgcaacgctggcccttggtattggagaggcgctcccgcagcttgttcccaccattgtgcagatattgatgacagtggttcaaacactgattgaaaatctgcccctgctcttggagggggctttgcagcttgtcatgggactggcgcagggaattttgaacgctatcccggttttggtcgaggcacttcccgccatcattgtggcgattgtggagtttatcgtggcctctatcccgcagatcattgacgcgggtattcagctgctaacctcgctggtggcagctctgccggatattatcacggcgattgtggccgcaatcccacagattatcgagggcttagtgacagcgattgtcggcagcatccctcagctcatagacgcaggggtgcgcctgctggtttccctcattcaaaatctgccgacgatcattacgacgattgtggcggcgatcccgcagattatttcctcattggttaatgccctcattaacagtatcccacagatcatacaggctggcgttcagctatttgtgtcgctgattcaaaacctgccgaccatcattgtggagattgtgaaggcggtgccgcagattattgcgggaatcgttaatgcctttacctcctccatgggccagatcgtcaatgtaggtaagaacattgtgcagggcctgtggtctggtatccaaagcctcgcgggctggatttgggacaaagtttccggctggatttccgggatttgggatggaatttgcagcttttttggcatcaattctccttcaaaagagatggcttgggtgggagaaatgctggtaaaaggtctggctggctccatcgaggacaatggcgggcaggcggtatccgccgccgagaaaatgtcctcggatattgatggagtaatgaataagctggcgcaggatatgcagaccgcgattcctacggactaccagcttaacgcaaatgcaaatgtgacgggcggtatgaccggcgcggcctttgcggctgctggcggcggcccgctggttatggtacagcagatgatcgtgcgcagtgaggacgacatccgccggatttctcaggaactttacaatctcatgcaagttggctcccgcgctcagggacgtattatcacagcataaggaggtgtggcctttgggctttcagtataacggaattacttctcaatctatgaatatcaaggcccacctaaccggctggcagatggttccgagccttcggagcaatacggaaactgtccccggaaaagcgggccttgcggattttggagccgacagcggcgagcggtatatcgacgtggcctgcaatgtctacccgcagaaaactttttccgatatggtggcggttttggatcaggtagcggcatggctcgaccctacggctggcacaaaacagcttgtactggacgatgtgccagaccggtattttatggcccgcctctccgatacagtggactgtgaacggctccttcgggctgccggttcctttaaccttcgttttctctgcgccgatccttacggctatgcgctggacgatgaaacctttactttttcacagaccggcgagcatgaaataaagcgtgaaactggaaacacggattccgaaccggtgtatgccttaaaaggaacgatctcctccggctcgattttgctctccacaaacggcgaggcgctgcgcgtagtcggccctctggcggatggcgagattttagtcattgataccgggctggtgacagccaaggtgacagacagcgcgggcaataccctgcgtaatgggctgccgtgtctggaagaactaaactttccgctgcttcgccggggcctcaatgccctttccatcgccaccgagggcggcgcggttttcacggagcttcacattcaggctaagagccgttggaggtaagatatgtcggtaaaaacaactttaaccttgcaggaggatttcaccggagaatttcctgccgcttgggcagaatccggcctgtggcgctttaatgaatcggaaccggacagcaatgaccggctcatggattcctccggccatggcagggattttaatattatccattggagcggaaccaccgccaacatgatgaaaggctggcgcgggtattacttccgcctgaatatcaataaccccacctcagagaaaacatatcttcaagccgtaaatgatggctcgattttctcctcgctgggggaacggattgtggtaggcggctggatgaatcccaccacctactcggtgggaaatacctactgtccgatttttaacacaaggcaggggccgggccaaccgattctctatctttctttgattcgcggaaagccccgcctgatgctttacaattcctccggttcgcttattctggacgaatcggtaacgcctccgttttctctggtgaataacggctggtactttcttgcggcggtcattgagccgggcgcatatcgcgcctgctatgtagtgggtgaccgcagctccggcgtggtctggatttctgattttctcaccattgacggagagctgaaccgttcctgcgtggccgatctcattatggggatgcacgcggatcagtattactatgcaggcggttttgacgaatggtttctggatacagattccgcgctaacggcggaggagctggcggaatatttcaaggccaccctgtttgccaacggcggcgatctgtccggcgatgtggacgcgcttactgagccggggagcgttaccctcagaaactcagacggggcctatcctgccagcgggcagcttatcaccaaagcggcggcctgctccctttccggttcaggccgcgtatctgttaccagtgaatatacggcaggcgtgacctctattgaacaggtggaaacctccacctcggatgatttggaggaatggtcgggctggcaggggattggccccagcggcgagctgcaatcatcgaaccgtcaatatatccgtttccgggtgacgcttgccaccgaggatgccagccgaacaccgaaactgctggaaatccagctccatgatataccaaaggccccctatgaaaagctgggctttgcccgtcctgtggtgctggacgaggacggcgcatgggaggcggttctggaaaatgcctttgatattgtcgttaccagtgaggtcaacggggctgatacgatggaattttatctgcccttccatgatccgaaacgggccatgctggacaatgaaaagcaggtgcagatcgtcaacgatatttaccgcatacgaaccctcaccgatacaaaggacacagacgggcggattgtgacccttgtatatgcggaggcagccttttatgacctttccttttccgaggaaaaagaaacggtggattttaacgcggataccgccgaggcccctatgcgccacgctctttccggtacaggatgggcggttggaacagtgaatgtcacgaccaaacggacgtggcaatgcaccgagaaaaatgccctttccattctgcgggccacgcagaatatccacggcggcgacctgatttttgactgcccgaaccggctcgtccacctgctgacctttggcggcaaggacagcggcgctctgttcgcctatcggaaaaatctcaaaagcattgagcgggtggtcgatacccgcagccttgtaacaaggctctacgcctacggcaaggacggaatgacattcgcttcaatcaatgatgggaaggagtatgtggaggatttcagctataccagtgaagtgcggatttccacgttggattgctcgaatttcaccaatccctatcaaatgctggaatacaccgagatgcgtctggcggaatactgtaagccccgcgtttcctatgttctctcggctatggatttgtcggctctgaccgggtatgaacatgaggcgtgggcgctgggtgatcttgtaacggtggacgataaagacctcaatctgtcggtgagaacccgcgtggtgcgccgccagtacaacctgcaggagccttggaaaacagtgctggaattatccactaccctccgggagctgggggattcctcagcgcaatgggataaggccgccgacgtgctggcctccaccgatgtgcttgaccggcaggaagtaaaggacatggttcctttcaaccatctgcgcaattcccgcgccgacagcggcatgaattactggacgaactccggctttgaggtggacgcagaaaatggcgtttccggtacggcatcctttaaggcggagggagttttgggaatgacaaagagccttgcgcagaccgtctatccggccagccgccgcagctataccttctcggcgcagatcgcctcggaggatttgaaaaaaggcgacagcggacaggtcggtattgaagtaacttttgaatatgaggacggcaccacggaaacgcggtttatcgacctcttttaatatagaagggagcggcctatggcttcttttacgcagactgcctccgatttatcccctaagggatacgggcgactgcgctccattaccgtccggctttgtattaccgactgcacaggaaccgtgtactttactgacattatggtacaaggcggctccattgctaccggctgggtaggccatcccagcgaaatccagtggactctggacggataaggaggcaggcatggctgaatttacacgattttcagaaacaatcctgacaaagcaggatcagcgggtggtgagcattactgtaaaaccggtgatctctgattgtacgggccggatttacttcaccgacctgatggtacaggagggcgaccggctgacgggatatgtgatccatacggaaacgctcctgcaaaagtaccgggaaaatggagccgttgtcccgcctcgcttttataacggtgtggtgcgctcggcggaaacggcagtgctatttaatctcggttctgatacgacggggctggactgttacctttatccggtgcaggacatggcggctggcagtatatcgctcgcgttgggagcaggcgcacataaggcggcctttccggcagcggtaagcgccggggacgagctggcgcttctggctacttcccggaaatgcctgctcaacgggaaccccacggaaaagcgcggctttttccagtacacggctgccggggacagcaagcacccggtcactttggaggagggcaagtctgcccggctgctctttgtctttcaggaaatgcaggaaggaggcgatgcgctgtgagggattatctacaaggcaggcgctgtatggtctggtcgttcatgcagaacgcccggatgtatgaggccctgcgagactatggcgaccggctggatacggtgggaattttcacctttgaggtggacgctaccgggacgctttcagaaaccggaaccagtatttccaccatgatgacctacatcaacaagtggcctcatatccactggatgctaaccgtgatgaaccacggcaccgccagcatttttacagccctgcgcaataacacaaacggggcgaaagataagtttttaaccgagctggtgcgcattatggaaaaatatccatggtgcgccggggtggatattgatctggaacgcggtggcgggtatgagaaccgggaggctgcaaacagcttgttccgggatatttaccagacggtcaaagcctacaatcccactaagctcgtcaatatctgcctgcccggcatgactggcgttcagggcagcgtgggcggtgagaattggtgtgtctatgccgatttgaacccgtactgcgacaccgcctccatcatgtcttacggtatggcatgggcgggcagcgcccccggccccgtatccccccggagctggttggaggggatctatgattacgcggtcacagccatgtcaccggagaagattttcatgggtctgcccggatacggctggaactggcagatttatgatacaccggaaaacttgggagaaacctaccgggggatttccaacacctactatgccgccaagctctggatgactggcggctataactttaccggggatgcgccgccccagcctatgatccccattattgcctattgggatgacgtggatatggtgccttgggcgctgccgcaagtctatgactacatggaaggctgggacgcggcctcggtggtttcccctatgcaaaaagaggtctacaaccgcaggcgttatttgacctgttacgggaaggaacaaaagacctccttcggcacgatctacattgaccgtggcggcggcaccccggattcctataccgggatcgccaacatttccgattatatgacagtgctgggggaaggcgcgacagcaacctttaactttacgattgagcaggcaggcacctatgacatagcagtgcggcttgcttttcctttttgggataagaacgcgctgaatgtgtcggtggacggaagctccaagactttttcagaaaaccgcctgtggtggccgtactggcggcgcacctgctggctttcctttgctactggcaggagcctctccgcaggcagtcatacgctggtaatcagcggcggcgttcccggcgtgcagttttacggtttccgggtatgcagtagcttttccgaggagccttccgccggagaagcggcctttaccctttcgccccggcagtttctggacgtaaacggcgatccggctaccccggacaaaggcttcaagctcacttgtgaaatgctccggcgaaaaccagactcggcacttgtctggtatgaggatttccgggacgatacccctctgccggacagctactggacgacgctttccggggaatggtcggtgtggcgggaaagctacaccaccgaaagcaggccctattccctgctggaaggctccgggaagctggcgtggaaatacgacggtttctccgatctgcatatccgggcgcgggtaggtttcccgcaaaatggcggtggccgggcgggggtattccttggaaacctgttctgctgcttaaactatgatactcagcgggtagagctataccaaggctcctcgcttttggggagctactccaccagcttttccaaaaccccggacgcggcgcttcacagtgacccgactgtttacaccatcgagatgcgcaagcgtgggaaccgcgtccgagtgtactccggctccagctatactctgcgctttaccgctacggtgagcgccacctccggttatgcgggcatacaggcggacaacgagattgtctgtgaccttctgcgggccggggacgcttgggcctatgagccttatgaatgtttcgatgtggtgtacccggatggcaggcgcaccagttttgggcgcattgcccgctccggtgtaacgtgggacgaggaatttcagattttctcggtcaacagtgacgtggacgaaggctctactcgcagcgaggatatttccctcgactatgatttctttcattcccacctgctggaactatcctgcgggaatgattacacggcgagggtgatcccacgggatataaatgtctggacagcccgcctgtttttgggcgacgcagacggcttttcgattctttactatcaggacgtggattcgctggtgtattgggctaacgaggctgcttaccggtggggcctgcgcggcattgctatctggtctttgggacaggaggatatgcggctgtgggaggtcatgccgaagcaaatataaaaccggaacgggcgctttgccgcaaggcaggcgctcgctccttatgtaaaaggaggatgaaacatgaagaatgtatggaactggattcaggtggccctttccgccttaggtggtggaatcggctggtttcttggagggttggacggttttttgtatgcgctgattgcctttgttgtgatcgactacattaccggcgtgatgtgcgccattgtggataagaagctgtccagcaatgtgggctttcgcgggattttccgcaaggttctcattttcgtaatggtgggaatcgggaacctcattgacacccagcttatcggctccggggaggcgctgcgcaccgcggtgatcttcttctacatttccaacgagggtgtaagccttctggaaaatgcggcccacatcggcctgcccatcccggaaaagctcaaagatgtgttggcgcagctccataaccgcaccgatgcagacaaagacacggagggcaagaaatgaggatcacggtaaaactgacccgcgccgagaataccgccctccttggcgcggggccggtggagctggatttggaggaatatctccttggtgtggtgccttccgagatttacgaaagctcccacatagaggcgctcaaagcgcaggcggtggccgcccgtacctttgcggttaagcgggccatggccggaacggtggtagacgataccaccagctttcaggcataccgcgccccgttggcagagagcagccctcgcagcaggcaggctgtaacggaaaccgccgggcaggtcttgacctacggcggtgagattatcgactgcttttactctgcctctaatggaggcacctgcaaacgcagcggcgaggtatggagccgggactatccctactatgtcaataagcctgatccatgggatacggcggcccgcgaggaaaagccaacgtccgccagccatggcgtggggctttcgcaggtgggctgtatgtgggcggcccggcaggaaatcccttacaacgaaatactggccttttattatgacggcgctgctttggtgcatgaatacggcaccggcagcgtcgtcggttttgaagaagaaacaggaggagaaatcggtatgaaattagtggaatcgtttttgacaaagaacccctgctatacggcaggaagaaaaatcacggtaaaggggctgatgcttcattctgtgggatgcccacagccaaaggcgtcggcctttatcaattcttggaacagccccagctatgacaatgcctgtgtgcatggttttattgacggcaacgacgggacggtctatcagacgcttccttggaaccatcgcggctggcattgtggttccggctccaagggaagtggaaataatacccatatcggggtggaaatgtgcgagcctgcctgtatcaaatacacgggcggcgcaacctttacctgttccgaccttgccacggcgcggaaagtggccgagcgtacctacaacgcggcggtggagctgtttgccatgctctgtaagcaatacggcctgaacccgctgtccgatggcgtggtgattagccataaggaaggccacagcagggggatcgcctctaaccatggcgacccggagcatttatggacgcagcttggtatgggctacaccatgaacaccttccgacaggcggtaaaagcaaagatggatgggggttcttctggcgacacttccagcggcaccctttaccgggtgagaaaatcttggagcgatgcttcctcccagcttggggcctttgcagttttggataacgccaaggcactggcagataagaaccccggctatgcggtttttgacgaaagcggaaaacaggtttatccctccacttctggaagcaccggcagcagcactctctaccgggtacgcaagagctgggcggatgctgcttctcaaaagggcgctttcaatgtgctggacaacgcaaaacgctgtgccgacgaaaatcccggttactctgtttttgatgaggctggaaaggttgtatatgcgggcagtgcagccgcttctacctacacggtgcagaagggcgacagcttgtgggccattgcagaaaagcacctcggaaatggcacccggtacaatgaaatcaagaaactaaatggcctgacctccgacgtgatttatgcggggcaggtcttgaaacttcccaactaagcatggtgggcggcccttcggggccgttcttttttataagaaggaggcgattccatgacagatgcacagaaagagcaggtgcgctatctgcgctgcgaagggctcggttatggagcgattgccacccggttaggtatttccgagaatacggtcaagagcttttgccgccgcaacaacctcaccggagtggcttccaaagagccggtggtggtatgccggaactgcggcaggccgcttccacaatccccaaagagaaaacagagaaaattttgctccgaggcttgccgccgcgcatggtggaagctgcacccggagcttatccataaagccgccttctatccggccatctgtgcccattgcgggcaggaatttcagagctatgggaaccggaaacggaagtattgttcccatgcctgctatatagcggcgcggttccagaaaggaggcacccatgacaaaggaacagtttgaccgggagaaaaagtatcaggcggccctcgcagtggcccgtgaaatgctgcaaaaaggcatcataaatgaggcggattttctgcgcattgaggccagactggcggttaaattccggcctgttttgggcggtattttctgctgaaaagcctttcttttcagggtggcttcctataacatcagtgtcctgaaaggagggcgtatttatggaacgcatgattcaaaaaattaccccgccagcgcggcacaaagtatcaaaaatgaagcgcgtggcggcttatgcgcgggtatccagtggcagagaagctccgcttcattccctttccgcgcagatcagccattatagcggcatgattcagaaaacgcccggctggcagtacgcgggtgtatatgccgacgaggcgctttccggcaccaaggacagccggggcgaatttcaacggcttctggctgattgcaaggccgggaaaattgacatgataattgcaaaatcggtttctcggtttgcccgcaatacggtaacaacacttcgtaccatccgggaactgcggctcatgggagtagacgttttctttgaagaacaaaatattcacacgatgggcgaggatggcgaacttctgcttaccctcctcgctgcttatgcagaggaagaggctcgctcggtatccgagaaccagaagtggcgtatcaaatccaactacgagcaaggcctgccttggagtgttaccatgtacggttacagacaggtcgatgggaggctggaaattgtgccggaggaggcggaaatcctgcggctggccgcagacctgtatctggaaggttacgggcggtatagattggaagatgcctttgccgccgcaaatatcaagggcaggcatggtgccaacttgggaggaaattccattgtcgggctactctgtaacgaaaaaatcgtcggggatatgctgctgcaaaaaacgtttgtgacagacccgatttccaaaaagcagcgaaaaaataacggtgaaaagccgcagtattttgtagagggctgccatgaggggattctcgacagggaaacctatgagaagattctggcggaacgcgcccgacgggcagacacctataagccacgctccggcagctatgagcggaaccgctttccattcagcggaaaaatacattgtggaaaatgcgggaaagcattcacccggaaggttctcaatggaaacactccctatgaaaagcggggctggctatgccgcacctttaatcaaaaaggaaaggcgcattgtgatgccaagcagattccagaggatattttgaagcgcttgactgccgaggccatgggcctgccagaatttgacgaggcggcttttgcggccaaggtggaagaaattcaggtgccggaaaatggaacgctggtctttgttttctatgacgggcataccgtgacaaaaacttgggataatccttctcgccgccatagctggaacccggaaaatcgcaagaaggcgcgggaattggcgcttagacaggtggcagaaaggaggcttgcacaatgccagcagtaacaacggcgcgggtaacagtgatccctgcgaaaaaagacaggcttccgatcaatgtactgagcaatgaggcccgcaagctacgggtggctgcctatgcccgtgtatccaccaacaatgaagaacagctcaccagctacgaggcgcaggtagactattatacccgatatattcagtctaaggacgagtgggaatttattgaggtttataccgacgaaggaatttctgcgaccaataccaaaaagcgcgacggcttcaaccgtatggtagccgacgcgctggccggaaaaatcgacctgattatcaccaagtccatttcccggtttgcccgcaatactgtggatactttaaccacagtgcggagattgaaagaaaaagggatcgaagttttctttgagaaagagaatatccgcactctcgatggaaagggcgagctgctcattaccatcatgtcctctctggcgcaggaagaaagccgctctatttccgagaacgtcacatggggccagcgcaagcggttcgcagatggaaaggtgagccttccttatcggcgctttcttggctatgaaaaaggcccggacgggcttccagtcattgttgaggatgaagcggtgactgtgcggctcatttaccggctgttcctctatggaaaatctccttcggccattgctgcctatctcacagacgaggggattcctacaccgggtggaaagaaggtgtggcgggccaaggtagtggaaagtattctcaccaacgagaaatacaaaggcgacgcgcttttgcagaagaaattcacggtagatttcctcaccaaaaagcaaaaggtcaacgagggcgaagtgccgcagtattatgtgacgaacagccatccggcaattattgaaccggaggtattcgagcttgtgcagtatgagctgaaaacccggaaaacggacgggcgtttcacaagctgccagcatccattttccgggcgcattatctgcggggaatgtggcggcatatatggcagtaaggtctggcactccaacacggaaaaccggagccttgtatggcagtgtaacgaaaaataccggggccagcattgctccacgccccatcttgcagaaggtgaaatcaaagccgcatttctggccgctttcaatatcgtgctggggagccgggacgagattatagaggcctacgaagaagtgatcgcggcgctgaccgatacggcagacttggatgcagaacaggaaaccttggaaaatgaaagcgaggttgtactggggcttattcagaaaatcatttctgaaaatgcgcagaccgccatggatcaggaagaatacaaccaccggtatgatgcttactctgagcggtttgaagccgcccggaaacggctggcggaaatcgcagagcttcggcaggaacgcaatgccaaaaagacaagaatccggctgttcatggaaaacatgaacaaccatcaggaactggtgcaatcctttgacgaggagctttggtattccacggtggactatgtgacggtttacgaagataaaaggctggtgttcaccttccgcgacgggcggcaggtcgaaatcacggcagaattatggagggcagcataatggagaaggaagcaaggaaaacaatgcgggtggcggtctattgccgcctcgcccgcgcggatcaagacgataccttgttagaggtgcagaaagaacggctgcgcatatatgccaaagagcgcggctatgatattgtggcggaaatagccgagatcggcagcggcctttccctgaaccgccccggcatccgggaaatggccgggctggcccaccgtcacatgatagacgcagttttagtcagcgatatttcccgcctttgccgggattgcggacaggcgctgcggttagaaggaaagctcaaaaagcaagtggtttccattgagagcataaagggcaacccgctcccggaataccggcgggccagaattgcgctgggctgtataatgaaataaggcaaagagaaaaccgcaggttccggcctgcggtctttttcttttccctctactgcaaggtgcttataaattcaagcagcagggctttttgcttctcggtgagtgtactccattttgcaaaaaactcgcgctgttcatccgttatttccacagcttctccgccttccgcgaaaaactgtgctaaggttattccaaacgcacgacaaatcacttccagcgtgggaagcgtcggcgcattattccttttgaaaaggttggttattgtggagtgagaaagatttgcctcttttgccagcctgtaatccgtccagccgcgctcctccatgagctgcttgatccgcttttgtgcgtccatttcatcacctgcccatctgtatctattctaattcccaaatgggtggtataatagtcacaatcggtggctactatattccccaagtggggcatagagtagtttatatcatgggccgcacatggagatactattcatacagacaggaggctttacattgcaagagaatggaaaagatttcttcgccatgctggcggagcgggatcatacgactgtggaaaaggttaaagagaaaatctcaaagcggatatgggagggcctacatgaccctgacccggagcgccgggcgcaatgggaacggataccatgctccggggatgtacccaccccggaggaatggctgcgctattctgtagaacgactgaaagaagatggccgggaggatttgctgcggcactacctcatagattaggggtgtgcatttccaaggcaaaggaatacaagatataggtacgcgggcagaaaaatagcgggaatgaacacctcatgttgtgttttcccgctttttatttccgccgtactgtatgaaatgttgtccctttagacacaacaaataaatccgaaccttgtgccgattggcaatgggttcggatttattactttttctgaaaatttatcatagaagcagaagggcaggtataaacacctgtccttctgctttttcggtatctttttcggtattatgatgctgcaatctgaattgcattttctcgtacccggttgattgtctcgatcaaagccgttcgagtcttcgcatcaaatagtttgataaagctggttggcttgtcaaaaggcggtttggtaagttccgcaacattttccatgtatccattcagctcaatgtgatgaatgattttattcacaaaagcgatttgtttttgatttagtgactgatcgttgataaaaacggaaaatgcctgcatggccgcttcatgatccagtttggcgattttacgaatgagtaagccaaagggcgtatcgccgaactctcgtttatagtcttccttgtttcccaattcactggtcaacactcgttccagctcctgataatctcccatagttaacggaacgttgtgcgtcaacttgtaaatcgcaagagtgttcccgtgttcatttacatagcggttgaccttagcgcgataatcctcaaagtcataggctgcatccagttgaacgccttcttggctgtcaataatcgggtcagtcagtttggtgacaatacgcttttgctcacctccaccttcatccaaaaaacggatcagatcacgcagttctttccgcaccttttcaaacagcagaatatcattagtatcccagaatgcatcggtatgaatctcctcaagtatcggtagctttgccttgatttgcggaatgctggctttgctttccagtagtacggctatatcacacaactgctttttggcatacttaaaagaaggcagctgctcgatatgagccagtatcagaccatacatgaagttgtcaaaacgcttggcaaactcatcggcctcctccgatcggataagtggtgcaatctgtgtcagcagctcgcctttgtctccttcgctgagagaaacaaagacatcccgctttttatacttctccacaacctgcatccgcaattttacagcaatcagatccgggttgagcgctgcaatctgcttgtggcaggtatcaaccatctcatctcgccatgtctggtaatcttcgccagcaaaggcactttcttgtaaagccatgacaattttgatctgcttgccaaaaatattttctgacagcgtttttgcttctctagcctcgtagccttccttatgctcccgaaaatattcaaaatttccgcagtaatcaaaaatcaagaaacggcgtttatccgtgtacgttccatcaatctgatccacacaggtcaaccctttgcacaggcgggtgccccggccgatcatctgccaaaattttgccttggagcgcacttttttgaagaataccagattcaccgcctgtggaacgtcgataccggtgtccatcatatccacagacaccgcaatatgcggttctttttccggctgtttaaaatcgtcgataatcgtctgcgcataagcatcatcgcagatcacccgctgggcaaatgtgccatgatactgcgggtacagcttgttgaatcgctccagaataaactcggcatgacgcttattctgagcaaagataatggttttgcccaaccggtcgccgccggcgactttaatcccgcgctccatcaggtcctgcagcacaatgtccacggtcgtttcattaaacacaaacttgttgagtgccgcagagggaatgaaatctggcatcctgtcgtcttcgataaagtcgtcctcataccgttccttgtcctcatcggacagatcatcgtaggtgatgccctcttcaagaaacttggttttgacttcataattataatacggtaccagcacatgatcctgatacacggccgtttcataatcgtaggcataggtaggaacaccgtgttccatctcaaaaaagtcgtaggtattgcggtcaacatcggttttcggcgtggcggtgagacccaccatcatggcgtcgaaatactcaaaaatcgcccgatactttttgaaaatgctccggtggctttcgtcaatgataatcaaatcaaaatgcgccggggtgaacagttgccgcccatccttggatttggtgtcatcaatggcatttaagatggtcggataggtggaaaacacaatgcgggcgttcctgtcgtctttgttggagcagagattgcaaagggacatatccggcaaatagtttttaaaatcgtcctttgcctgctttaccagtgcggtccggtcggccagaaacaggatatttgtcacccattttccccggctgaggacatcggtcaggctggaggcggttctcgttttgccggtgccggtggccatgaccagcagatgcttgcggaatccctgttcgatctgcccgcagaccgcccggatggcttctttctggtaataccggtcggtgattttgtcgtcgatgggaatgctcattaaatccagccgctccgtacgacggttcatcagcttttgcaggtcgtctttgctgaaaatgccgctgactttccgcgggggactgctctggtcgtcccagaaatacgtttcaaagccgttggtggtgaacatcatgggccggcggccaaatttccgttccaggcaatccgcatacaaagccgcctgctttcgcccgatattggggtctttgctggtacgcttggcttccaccacggccagcggcaggccgtcttttccaaacaggacatagtcacagtaccctctctggccaaccacaccggccataccttccactggatattcctcctgcacatccgcgtccgcaccggtgaacttccaacccattagcttcatatccacatcgatgtaggttttacgggtttgaaactcggagaggtcttccggctggaagacgcgctcttgccggtgctgctcttttttagcagtgtattgtgcggacatctgctcgatctgtttgcggagcgcctcgatttgggcgtctttttcatccagcaggctttcctgctccttgatttttttgatgtcgacagttaccttttctgtgggaatcaagctttcgtcaaaggtgcgcccttcatagtcggaaccgtagcagtattcaatccactggatgaactcaaacaaaccccgcagcgaagcaagggcgtcgcttttctgcacgctccgttccgtatgtaccgccagattgcccagcttgatgataaagggcagcttgccccaggtgttgtagtccacagcagaacgaaaggtgggctcgtggataagggattgcaggttgtccttgtagggcattttcatggtgttgtcggcggaatagacccacttaaccgccaattccagcgccttgcggcagccgactgcacacatagccggggcggaggcgtagattttttcggcttccacgcaggcaggggagaagagggtgtattcaggttttgattgaagaaaagaaaaatttgacataaagacctccctgttggtactattctttgacaacagttgtccccgttaaaaacgcaaatatatcagcacacatagccaatgtatcagaatcaccacctgatatagtattcaattccatcaaattacaaagatgagccccatatcctcctatagataatgcagatggatttattccagcactatcaaaaatcacttccgatgacataagaatattagaacgatacagatcaaatatttcggctgctattgttacatttgctaaacctgaaactgattggtatgctttcttgcgcagccccataggaactgatgaatatcttgcaatagcgacgcaatgcaaaatgaggatctgtctgtaagtcattttctcagccagtttaatcaaaaaacttgccgtaggcgccgttatgtccgtggaaaacgcaatgttggcataaagttttgccaaatactttagtttacgttcctcatactcgcgttgtgccactagaagtgttccttctaaaatttcttcggctgaagaccgcccgttgattttttcatcgaaaaaatcgtcctcacgtagctttctgttattgtttagattctctgcaataaattctttggcaagtgtataaacagtctcgacttttcttgtctccgactgcgaaagcacacgtcggcgtatttcagcaccaatagtttggaccaccttttctacagctgttcctgccaagcttcctaaagcagcacctgccggccctgcgaaggttccaccgattgctgcgccaacagttgcacttgcagcagaacctatataatcggctccgttttcaattaacttctttttggtactttctttcggttctaatcccacaaatcaacacctcacccaaaatattcctgcatcaatgcttttttcagtatttccagtttttcaaggctcttctgaattgccaattttgacttgtcggtttgttcgacaaaggcagcaaactgctcctgcaactcaagtggtggcaaatatatgaccgttgcattcattttcgaaagcaacaaattgggctgtgccgaagcgctttctaccatgtacatagacggattcgccatatagcagtatcgcaaaaactccgcactaaccatatcggtttttacctttaacaaggcaacgcttttttgcaacagtgttctctccgtgagggggctaacagcaattgcagatttaccgatggttgccccggtgttaacaatgaccatatcaccctgctcaatgttacaacgccgataatctttcgcaaaatccgcgtatgtgatttgtggagcagtgtcataatggactgctccatcgtagatttcacgcgcacctatgtagtaataacccgaatttacttcttgttcacaacctccgtgtttcccgtcggtgatcttatggcagacctcttttagcgttactgtcggaaagttgtaaggattctctttgactgtaccaaacatctcgataaatctggatttcaccaattcatccagcttatccagttgctggcggcgtttggcaatcaggtcgctgactttgtccagcaccgccgcaattcgatcctgttcgtctggagagggaactgaaatcattatttttttcaagccagcatttgtaattgccttttgtgttgctccagaactgtgatgatctttctgttttaaaaattggtcactggtcaatatgtggtataacaaccgagttgttatgactgcttcttttgctctaactgcataaaatccagttgagaacaaatactcagcgctctcagaatctacacgcaatgtttttttagtaccgcacattttggcaaagagtatatcgccatctgctgctaccagatttgctctcgagggacgatctgtatatgtaaccatttcagtctgattgtagtcaacgtgatcgcaatcaaccgctccagtgcttacatatattttttctcctttgaaacaagaaggcgttgctcccaccagtaacatgcactctagaatattatgcttaatcacagcatcccctccaactcttccagccctgcggtgatctccatttccagctcgcgcaggtcggccataatttcagtagtcgagggatactccaccggcacatattccacctttttgtacttgttgatggacaggtcatagtcgttgtccgcaatcttctgctttggcacaaaaaagctctgctcggtgcgccgacggtcagcttctttttcaagattgtggaaccgctcgatgatgtcgggaatgtcgttttccgcgatttcgctgcgcttgtcgtccagagaaaagccgtcggctttcatgtcgtaaaaccacacgttttccgtgccgcccgcgtctgtcttggtgaacaccagtaccgctgtggacacgcccgcatagggcttgaacacgccggagggcatggagatcaccgcccgcatctgatggttctccaccagttccttacgaatggccttgtgggccttggaagagccgaacagcacgccgtccggcacgatgcaggcacattggccgccctttttcagcattcgcagaaacagggccagaaagagcagctcggtctttttggtgttggtgacagccttcaggttatcgtggatgctttcggcgtccacagtgcccttaaagggagggttcgccagacagatggtaaacttgtcgctgatctggttttgcttggaaacgctgtctttgtagtcgattcccgggtggctaatggagtgcagcatcaagttcatggcagaaatacgcagcatggtgcggtcggtgtcaaacccggtaaaggcgtccccagcaaaatgctcccactgttcgctggtcatggtatcctcgtaatgccttcggatgtattccgaagcagagaccagaaatcccgccgtgccgcaggccgggtcgcagatggtatcgtccggagtgggccgcaacagctccaccatcatttcccggatgtgcttgggggtgcggaattggccgttttgtccggcggtggccagtttacccagcatgtactcgtacaaatcgccctgcatatccagatcggcaatatcgtgctcatataaatcgtccagaccggtgataatcttttgcagcacctggggcgtggggatcagaaacatggcgtcgctcatataccgggcaaaggctgtctcgctctgcgtgtcgctgacggaatcgtcggcaatttccaccagttccccaaactcggtgaagtccggcagacgaccatgtttcatgtttttgatggcagggaagacccgctgggaaatcacatcgaaaatgtcgcggggatcgttattcttgaatttgctccagcgcatggactgtcctacggcggactgggggaaaatcttgtccatcttctcgccggtcatgttttcaaattcctcagtttccagttccttttcatctaatgaacggatgaacatcagataggtcagctgctcgatcaccgtcaaaggattggtaatgccgcccgcccagatgtccgtccagattttgtctactttatttttgattgtgcctgtaatcatgcgtcttttcctccgtttgattcatccgtaatgaacgctatcgtattgccaatattacagtttaatactttgcaactttgcagattttttccatgctatccatagaaaccggttcatgagacgcgctaaaacattgtgctgattttgcacggtgcatcatatcggttttactcaatccaagatcaatgagtttttccaaaggagattgtaatggattgtcatgatctgtctcatgaattttctattctaagtatagtacaatcgaattaaaaagacaaatatatttcaagaaatcgtgatcataaaaacgttcgatatttgttgtctatccgcttggccatccaaattcaatacgagtaaaagaggcaggctatccatgtggatagcctgcctctttttacttgccacagatctcttgaataataggctcctgtccaatcatccagttgataaattgcgtcgtagataacgtatcgctttgaatctgctttttacgttccacagcttcctttcggaactgccggagagcggttttagccctttggatctgttcctgtgaggcgtgattcttttccagcttcttgatgcggttgtaccaaaacatatactctcgcttgtaggcctgctcgtattcttcatctctggatttgctgtcgaaactcttttttgccgcctttttactggctttgcgacaccgttcgctgcacagattgctgcgggtatccggagcgaagaacacccgcccgcattggctgcaggtgcgcataaccatgccggcatccagtattcgctgacggtaatagataagagccggtcgcagggaaccactcactaccgcacattcaaagggaacttctccatggggataccataactccagcttggcgtcttcccgatgattccatacaggtacaaccggattttctcgtttccaatttgccatctccggcgagtattccccaaagggcaggatcagcaactgcgcataatcccgcagggcagtttctgctttgtatttatctcttcctcggcagcagcgcaggtacatctcccaaatttgaatggctgcatacagagcagcggaatttcccaccaccagctgggaaagaagttcagccgcattccgctcaccggcagtgcgctccgctgctttccgcgccgacagtgcccctaaaagggtccacacagcctccgtccagccatctgcagaggtttttccaaactcgcaccaaaacgctcccagtgggcgagtttgggccagatacagggggttatccaaaccacgcaaagcagcttctacctcgtattctgttccaagccacaactgttctttcaactgtttggtattgactcttaacgctaaaaccacccgctgtgtcaaaggctctttatgttcaaagcgatattcttccatgcctccacctctttttatgggaattataattttaaaagttatgatttcttatatcataccgcaaaagccttgaaatggcaagttttccgtgttagactgtggcatacaatctttcctgcttggagggggactacagggggtggcaagctaatgattcccaccccaaacctcctacttggctgggaaagaaaaagagagctacagaaaaggaggggtgtcagccaatcaagtcgttttagaaaacaagacagaaccaataccgcagtcagcggttgaaagtcttgcccgcacattgcttccccagatgcaggcgttttttgagagtgaacagggcaaacaggcactgaaggaatggcatgaagaaagggagcggcacagttgaaagctcccgctgggctgggagagtttttctttcccagccggtacttttttgatagatttgaggtcggaatttgtacagattggtgatagctttccggcagcagttgtgatagtgtgttgtgctgggaaaacggttttcccagtcggtgactggttttgcaagcatagcgtttggatatccaccaaacgcaccttgggagaacccaaaccccttaaaaaatataaatggaggtgatgcggatgaaggcggtgatttatgctaggtacagcagcgacaatcagcgagaggaaagcatcgaaggacaacttcgggaatgcaaggaatacgcagagaaaaacgggatcacaattctgcgtagctacatcgactgggcgctttccgccaagacggataaccgcccgaaatttcagaaaatggtgcaagacagcgccaaagggttgtttgacactgtgctggtgtggaagctggatcgctttgcccgcaaccgttacgacagcgcccattacaaagcagtgcttcggcgaaatggcgtcaaggtggcatccgccacggaaaacatctctgatgggccggagggcattattttggaatccatgttggaagggatggcggaatattattcggcggaactggcgcaaaagatcaatcggggccttacggaaaatgcactgaaaggaaaaagtaacggaggaggtattccactgggctatgtgctgggcgaagaccgacgtttaaaaattgatcctgcaacagctcctatcgttcgggaaatttatcaacgatatgcaagcggagagatgatacggagcatcataaaatctctcaacgagcgtcatatcttaacgaagcagggaaagccgttttgtcaaagcagttttgatgttctgctgcgaaatcgaaaatatatcggggagtatcattaccgtgatattgtcattcccgatgctgtcccggctattatccctaaagatttatttgaaagggtgcaggcaagaatggagaaaaacaaacacgcactggcaagggcaaaagctcaggaagaatatttactgaccacgaaattgttttgcagtcgctgtggacgcttgatggtaggagaaagtggtaccggaagaagtggagcgattcatcgctattacaagtgtattgggtctaaaagaaaactgggctgtcataagaaagcagtgaagaaggactggatagaacgtgttgctgtacaatacacgattcagcgggtcttccatgatgaactgattgtccaaattgcggacaagttggtggaactgcagaatgccgagaacaatagtcttccgctgctgcgcaaacagcttgcagataccaatcggggcattgaaaatatgctcaatgctattcagcagggcatcctgaccagcagtaccaaagagcggctggaggcgctggaaaagctgcgggaagaattaaaggtcagcattttgcaagcagagttagggcatctcaaatacagtcgggaggacattatcgagtggatcagccggtttaaatatggcgatcctgacaacaaggaataccagcgacagatcatcgatatcttcctcaacagcatctatgtatttgacgaccggctggttctcacgtataattataaaaacgggacgcagacagtgacgcttgcggatgtttctgcggttttcggttcggatttggagtcttgcactccaccagaataggaagcgtcgaactgtttttctttcggaatgagttcgcgcttgtgtatagatttgggagcgccaggtagaggcgctcccatttcgtattgcaatcataggacgctgtattttgcgttttaagcccgttggggtactcgtgtgccctggcgggcttttttgtgccttaaaacgcctctgagagcgtcaaaggaagcaaaagcaggatgcaggtgcgcatctcgctctcgctcgatgctgggattggccgccctgagggcggctggctggttcgggtcttgagtctgggtacagcaggggcgggtgcagttcttgttccactttttaactcaaaaagtggaacgtaaaatttccccagtttatcggggagtacgggcaagtggatgaaatcctgttccacttttgttttcaaaagtggaacgtaaaaaatcccctgtttatcgaggagtagaagcattgttccatttgttccacttttcaaggacataatatagggaataaaaaatcctcctttcccctatgtacttcttttttatctatatagggtttcggaaaaaagtggaacaagtggaacactcctcggggaggccgatggatgcgggaaagaccccgttccgtttttcaaatgaaagtggaacgggtttttgctgggttgcccgaggaggccgatgaacacgagaaaaagtatgttccacttttcaaatgcaaaagtggaacaaaatggaacaagcctctcctgctgtgtacggcccttcttctgctttcggctttttggcgggcgcgcaaattttttttcggacgttttccgctcgtatatgagctgaaacaagcctctgacccgcggaaacgggaaagaaggtattgcgttaatcgagttaacgccgtataataatattcacatagataaatggctcagcacccgtcccgtccttgatgcggggttgctaccgggaataggagccgagcgctcggtcgaataggccgtgcgtcacgggcgaaataacgaacacgaagctcccgtggaaaccgagatagacaaggcgttttctgcctatgtccttctttggtttccgcgggagcttttttgttttcgccaaacggattttgaacatggaggtggctggttatggctaaagaacagatgaagacggaaggggcgaaacccctttacatgacaacgtacgaagcggcggaattgctcggcctgagcgcagggacgctccgcgtttggcgttgtcaaggcaaaggcccgagttactacaaggtcggcaatgcggtccgttacaaggtggatgaccttgaagcgtggaagagcgcgaacgtgaggcgcattgagctgacgaattaaggaggtggaaatatgggcgaaaaagaaaaccgccccgttgcctgcgcagcttccgggacggcctctacctgcgattatgatagcacgtccgtttccgcaggtcaagatatgaccgagaacgagctgattagaacggtcacagagaattatctggcgggcatcgacatggacgaccgccccgctcccgaacaggtcgagcgggaacttctgcaggcgaccaacaacgacatcgaggcgtacaacctgggcccccgcgacccgagcgcgccggtgggcgcgaagcagaaggacgcctatcccgaccagaagaagggagacgcccgcctgcgtctgcgcaagcacctggacccgtaccagattgcgctgattgtgcgcgagctgcaccatgcggtgggcatccgtttggatgactcgaacagcgacgataacttcgacatcggcgtgtaccagttcgatggcgtcaacgagggcacttacgatacgtcccgtctcggcctggagcgccttatccgcagctacgatatggcgatttccgcccgcaacgtggacgagacggtcgccgttctgcgctccatctgcccggtgaggcagaagacgaaggattccgagctggttgtcgtgaacaacggcgtgtacgactacgccaacaagttcctgctgggcttcgacccggagatggtgttcaccgagaagagccacgtggatttcgtcgagggcgctaagaaccccgtcatccataacgacgaggacggcactgattgggacgtcgagtcctggatggaagagttctccgacgacccggccatggtgaacctgctctggcaggtggtgggtgccaccctccgcccgaacgtggcgtggaacaagaccgcgtggctctattccgatagcggcaacaacggtaagggaactctgtgcacgctgatgcgcaacctgctgggcgacggcgcgtgggcgtcgctccccctgaaggcgttctcgaacccgttcatgctggagccgctttcgcgggtctccgcaatcatcactgacgagaacgacacgggcaccttcgttgacgatgccgccgcgctgaagttaatcattacgcacgacccgttcctgatggaccgcaagttcaaggacccgcgctcggtgctgttcaacggcttcatggtccagtgcgtcaatgagcttccgaagctccgcgacaagtccgagtccctgtaccgccgcctcctggtgattccgttcgagaagcgcttcgagggttgcgagcgcaagtacatcaaagacgactatctgaagcgcaaggaggtgctggagtacgtgctgtaccacttgctggcggagaccgactactacgagttggacgagccgcaggcatgcgccgcgcttctgaacgagttccgagaggtcaacgaccccgttcgccagttcctgggcgacgtgctgccggaggcatcctgggacatcctctcgtggcagttcgtccacgacctgtaccgccactggttccagaggaacatcccgtccggcaggccggagagccgcaaggcgctcatcgcggacgtcaagcgcctccttgccgagtacgaggtgaccgagtggatgaacaaggcgtaccgcggttccgaccagggccgcatctgcatgcccgacctgcccgtccgcgtgaggggtctcgtgcgtacggtgcctctcggctcgggcggtagcaacaaaacagattcagaggacaaggaggattaaggatatgacgaatttgaccaaggaggagtacgcgaagctgcacctgaaggccaagcgcgggcttctcacgccggaggagcaggcggtgtatttcgagtacagggaggagcaggcagaggctgcgagggtaaatacgccgccccctgttcagccgcagacgccgcccgttcagaatgtggcctacgggcagccacagatgcagggtgcgccctacggacagcccgtgtacggtgcgcccatgggcaaccagaacccgggcgcgtttcagcagccgcctatgggcggcgggatgcgttgcccccgttgcgggagcacctacgtgagcgtccaggaggtgcagaaccacgttgcccagacgcccgttcgcgcgggccatcacgggtgcttgtactgggtgtttatcggctggtgggtagagccgttgattttgctgttcatcaccgccgtgccgaggctcattttcaacgcggcgaagccccgcacgaagacccacgctgtgtgccagacgtgcggccactcgtggaccgtgcgctgacgatttcagagagagattaacgacagaaggaggtttcaatcatggcaactaagaagcgttactcggacatcaacaaggccatcaaggaggccgaggcgaggcgcgaggagtattacaagcaggtcggtcgtgtgatgttcgaagagtaccccgagctgggcgacatgaacgtcaccgacatgcgcagggccgcgcgcttcctgcgcgacaacctgcccgaaaaggcatcttcgaagggtgccgacacgggcaaggcgaccgcccagaacggagcgcccgccgcgtccgattcgggcggcgattccgcccatgatgcacgcgagcctatgcccgtgaggggctacggcgagggcatgtaaaggaggcagtcgtgcctccatccggcaccccgcaaggggtgtccggcgtgccccgttccgaatggagagttctgccgagtcgtcggctgaaaccggttgggaacagggcacccctgggggttcgaaggggacagcgaaagctgccccctcgcgagcgggacgtgtacatacaaaacggaggtatttttcgctgcagcgaaaaaaccggaagttttgtatgtacacgtcccatgctcgctacctttttccctgcgaaagcatttgcgaaaaatcgcgtcgaacagacgcgggcgattgatagaaaaaagggaggtgttgatatggcagtgagtgccgaaaagagaagcagccgcgtgcgccgccaggcgtccaagaagcagctcaagaaccgtaccgtgcaggtgcgattctcggacgaggagcttgctgctttggatgcggtctgcgagagcacgggcatgacccgctccgccgtgctgcgcagctggaccgtgcccggcgagggcgctggctccaacccagtgtacgtggtgacgaagaacgccgacgcggagcgtctggcgatggaggcgaggcgcataggcgtcaacgtgaaccagattgcgaggacgctgaacgccgaggcgaaagggcgcgggggcatgcttcgttccgaaaccctggacgggtgcgagaagagcctcgaagaggtgcgcggcgagctgtcgaagctggcccgcgaggtggagaccctgcgccaggatttcgggtcggacatgttctccgcgctgatgtactcagacgacccgggcaggttgagaaggctcgtcaattactggttcgggatgggaggtgatacctgatgtcaacgactcacatccagcccctgccgaacgtctacgggcgcatggtctacacggaactcggcgagggcaagaagcgcactgagaacatccagaacgggacgaaccgcatcgccgctcagatgggcgacggtgactcccgcgaggagttcgtgcgcttctgttccgccatgaagaggaagaaccaggggcgcgagaacgaggggttcgaggtgcgcgtctcgtgggcacccgaggagctgtccaaggacgaccccgaggacatccagcgcgcctacgagtacggctacctgctgtgcaaggaggtggcacccaacgtcccgtgctgggtcacggtccacaccgacggcgagggcggttgcgtgcacgtccacgccaccatcgcgaaccacgatttggagacgggcaatgccatcgcgcacggcaccgaccacgccacggtcaagcgcaagaacgaccagctgagcaggcagatgggcttctccgtggtgggtccccagccgggcgcgcagaggacgagatgggcggaccgaaagagcgagttcgagccgggcgctttcgagcgcatgcagagaaaccgcgtcgaggaagcccgcaacgcgtcgtccagcatggacgagttctgcgaggagcttaggctgcgcggcgtggagctgaacgaggtgcgcaaggtggacaaggagaccggcgaggagaccgtgggctggagctacaaggcgcacgacccgctgggcaagaccaagcgcaagaggagacgccgtgcctccaacctcgccgacgacctgaccaaggaaggcgtcgaggcgtacttcgaggagaagcagaggcaggcggaagcccagaaggaagacgcgccggcacctgttcccgcagcggccgtcgcggcggaaccgcagccggattccccggcagagccttcatttgacgtgtacgccgtcaaggagtccgacgtggcgcagatggcgggcgacctccagagggcgcacatcaaccgcagctgcgagagcggagagccgttcatgggcgagcgctacgagcagctcatggaggcgggacgccacccagaggaacagatggcgaagctgcgcggcgaggtggacgcggcaaggcgcgagttccacgcttccaaggaggcccgcgacgcgctcaaccacccgtgcccgaacctgctggctggcgcatgggtgttcgccaaggctgggcgcgatgccaaggaccccgtgtcccgcatgatggcggacatgacggccatgatgctgcgcatgctgattcagcaggccatggaggagcagcgccgccgggagcgcgaagctgcggaggggcgtctgtacgagtcccgcaggaacatgtgggatgccgagaagtgcctgaagtcggccgagaaggcccttgcccacgaggacgagcgcgaggagcaggcgaaacgcatgcgcctgcaggaacgcgaggacaaggcggcaaggtgtgccggtggccgcgtgaagtacggggccgatgcggacaagcagtatggcgagtgattcatagagcgctggggatatttggcggggatattagggggatatttagggatatttatctaaaatattcccgctcaatgcccatcgggggcagttgaaaaagataagggagcagcgcgatgctgctccctttactgtgggtcagtggatttccggcgcgggcacgtaatcccagctggttccgaagtgggttatcccccagacgtacaaccccagctccgcgtcgtagcacaccggctcgtcggtgtgctccatgaggaagctcgggtcctggacgatgtaccactggaatatctcgtcccagggtgcccaatccccgctcaccggctccagcgggcggctggctatctcgttggcgagcaccatgccgcagcaggtctcggccaggtcggcgtaggtcttgatgccgaagtcactcatggtgcccctcctctgcctcctcgatggccacgatggcgttcacgacgcactgccgcatggagcgcagggtctcgcagtcgatgctctcggcgaggatgtctgcgtccagcaccacctcgcccagggcgctcacgaaccgccactccatcacgttgtcgatgcgcttcagcacgtccatgagcgacgcgtggtccatggcgggcatgtcgccgtcggccttcgccatgcgctccagctccttggccttggccgcgcagaggcgcgaggtgcgcttcagcacctggatgcgccacatgacctcctcgtccgtgccgtggaacctcttccagccttcgttcatgtgcggacctcctttctcttcacgtgggcacccgatgccgaaggcatccttcaaggggtgctggcccgctaacggcacgcgaagagaccggcagaggggctttggatgggagtacgcgcaaggggcggaagacggcggttttcggcatccgctcgtttacgaggcgatgcgggaaacgagccgttccgggtgacgagagaaagcccgtttcgagaccacgaaaagcccagctgaagcccaggaagtggcagttgaactgcgtttttcgcgggcttataattaaatatggaattgcataattgattaaatgtatagcgaggtgagcgatatgaagacgattctggtatgcaaccagaagggcggcgtgggcaagtctctggtcgccgacgagatagcattctccttcgagcgctccggcatccccgtgagcttctacgacctggacgcccagggcggcaccctgcaccgcacccgcgaggcggacggggtgcaggtagccgtggtggacacgccgggggcgctccaggaggcgctgtcggaatggctgaaggaggcggacgtggtggtcatccccacccgcaccacgtcgagggacatcgagccgctgatgcgcatgcgcaaggcggtgttcaagcacagccgggcgaagattgtctacgtgatgaacgggtggaaccgctttaaggcatcccgcgacttcatggagtggttcgaggggcttgcgggcgaccagacggtggtcacgctgccccagtccgaggcgttcgtgcaggcgggcgctgcaggcgtgtccgtggtcgagttcgaccgcaggggcaaggccgcgagggcgacgcgcgccctggtggacacggtgcgcgaggctgcggggttcccgagggaataaccgcaggtcagagccgtgttccgtatggacaaatcgagacacaaggtgtataattgtacaaatgcgtaaatgattaaaggaggtcgagctatggcgaacatgttcgagaagtatgctgccgaccgcgaggccgagcagaagaagatagagcagacggtttcggcggacgccgcgcccgccgaggacgagaagcgcaccacgctctcgctgtcgctcacggtaagcgacaagaaggcgctgaagatgatggcggcggagcgcgagacgacgattgccgcgattatccacgagtgggtcgcggagcacatgcgggaggtggatgagtagtggcaaaaagtatgacggaggatgccgtgcgcgatttggcacgtgacattcttggacttgcagatagtaatttggctcgtgctggcgttggccagctcacgacgttcaaccagctcggatttccgggcattgccgacaagtcggatggatggtatttgcccaacaacaaggcggaagttgcgcttgttctggagacgaaggcgacgcgtattgcccttggtcaggcgcaggtggacgaggtgctgaagaacatccgcatcatgcaaacgcaatacgagaaggttatcggcgttctatacaacggcgaggacgtgcgcgtgttcaagggcgaggaggaagtcaagacgcccgacaagttgcagcatgtcggttattacctgtcgctctataccgtcgatagcatcgacaaggagcgcatctatcagctgacagcgcgtattaacaactgcctgcattttgagttcggcatcaaaaacctgtatcaccgcatgattttcacggcgtgcgcgctagtcgccgagcggtacggtgccggattgaagcgcctgaagaatctgggatatgcgacgttccacaccgcgattcactcaacgctctccaagtcgctggaggatagtcgcaagcagaatgcgaagattgacatcttgctggaggaatattccgacatcaagatgaattcgaccgacaaccagaaggcaatcaacgacttcatcgactgggttgtcgagatttccgagtgcgtcaactcgaacgagtggcgaggcgaggacgtgatgggcatcttctttaacgagttcaaccgttataaaaagaagtccgaatcggggcagatattcacgccggagcacatcacggacttcatgtataagattctcgaagtgaacatggatgactgcattctggacgctacgtgcggttccggcggcttccttgtgaaggctatggcgaacatgattcacgaggccggcggtatggagacgaagaaggccggcgagattaagtccaagcagctctatggcatcgagttcgaccgcgagatttacgcactggcgtgtgcgaacatgctgattcataaggacggcaagacgaacctcgaacagatggatactcgctcggaggcggcctgcgagtggatgcagtccaagccgattacgaaagtgctaatgaacccgccgtacgagaacaagtacggctgcatgaccatcgtcgagaatgtacttgacagcgttccggcgcacacgcaatgcgcgtttattctgccggacaaaaagctggagaaggcatcgaaggcgcagatgaagcggattctgaagaaccaccgcctgcgcaaggtcatcaagttgccggaggacctgttcttcggcgtgggcataaccacgagcatcttcgtgttcgaggcgggagtcgcacaggacggaaaggagttcttcgcctgctacatggagtctgatggtctggcgacggtcaagaacaaggggcgccacgacgtctacggcaagtgggcggctatcgaggcatactgggtcgatgtagtcgagaagcagtctggcgatgatacgtgccagtgggtgaatcccgccgagcacctgtcctatcagatgccgcagaagccgttcgagattttcgaggaggacttccgcaagacggcaatggattacctgatgttccagcagggtatcgacgcgaaggcgttcggcgagaagctgctagacaccgcgatgtattcgagccgtgtgagtgccgataacgagtcagtaaccgttactatgcggaaaggcggtggtggcgatgtcgaagattgatacaagcgggtggagaatatttcgagtcgaagagctgttcgaaaccgagaaaatgggtcgtaagattcaagtcccgactggaagctggattgcttcaaagaatcttatgcccggttccacgccgcgcatcacggtgtcgggtgttaataatggcatcaccggatattacaaggatgttgatgacgcaaactaccgcgtttataaaaactttatcagcgtgagttttctcggaacggtgttttaccaggcaagtagagcttctttggatatgaaagtacattgcttgaaaccgctcaatatcgaattgaacgaacgtgttgcgtcctttttggtaacgatgattaaagccgccttgggcagcatcgagtattccgaccagatttcaagtaccgtgttgcctagtttggaactgatgcttcctgtcgatgcgtccggggagcctaattgggcttacatggatgagtacatgtcggcagtcatgggggaatctggggcaagccttgagaatatggggaaagtcgagaaggagtttcatccagccaatgcttccgattggcgtcagttctctatcggcagcctatttgagattgaaaaaggcacgcgtctgaccagagcggcgatgatagagggagacacgccgttcatcggtgcaacccttgaaaacaacggcataacggcacgagtgggcaacattggccatgttcaccccggaggactcatgaccgttgcgtacaacgggcagaaggcgacgggcaaagcgttttaccagccgattccgttctgggcgtccgatgacgtcaacgtgctttatccgaagttttctctcactgagtacatagcgctctttctcgcacctctgttttgggaagcgggcagaccgtactctttcggggacaaatggggcaaggacgtcatggaaagcgattaccttaccctgcccgccaatgcatcgggcgagcctgattgggattacatggacaagtacatgcgaacgataatggaaagcgcaaagtccgatttggctgctatgcagtcaatcagacaatgacaagcaagcccgccgttccaacggggcgacgggcttataattaaatgcgcatttacacaattcatcatccaaaggagagaaccatgagaacctataagcagaaattacgggagggggtggcagtttggcacacaagaagaagttcgagctgaacgacaacaacctcgccatcgcctactaccgattctcctcccattcgcagaacgaggcgagcattgaccagcagcgggagcttgcgcatgcgtgggcggacgcccacgggttcaaaatcgtgaaggagtacgaggacgcggccatatctggcaccacggagaaccgaccggggttccagcagatgctgtcggaggtcgcgaaaatccgtccccgtgttctcatcatgtggaagaccgaccgcctggggcgcgacaagtacgtgctggcgatggcgaagcgcaccatccgcgacgccgggtgcgagatacgcctgctggcggagaacatcccgaccgacgggccggagggcgtgctcatcgaggggctgatggacgccatggcggagtattacagccgccagctgtcccagaacatccagcgaggcatggactacaacgcccagcacgcgctctacaacgggcacaagctgttcggctacggggtggacaagtccacgaagaggtacatcgtggacccggacaccgctccgttcgtgcagcggatgttcgcggagtacgccgagggcaaggcgatgcagaccatctgcgacgagctgaacgcccggggctgcgcaccacgcggggcgcgaagttcggcgtgaagacgatgaacaagatgctccagaaccgcgcctacatcggcgagtaccgacatggcgacatcgtggtcgagggcggcatgcctgcgctggtggacgaggagactttcgacaaggtgcagcggaagttcgccgagaacaagcgcaagggttcccagcgggcgcgcggcatggatgagaacgacgccccgcgctattggctgaccggcaaggtctactgcgggaagtgcgggaacaccctgcagggcgtgtccggcacgagcgggacggggtggacatattactactactattgctccgctcagcgccgcaagcagtgcacgctgaagaaggtgcgtaaggagaagctggaggatgctgtcacgatgattctccggtcgattctccacgactccgagaacctgatgtcgcttgccgtggacgcggcggcgtactacgagaagaactaccgcgacacgggctacctggacggcctggaggccaagcgccgtgaggtcgagaagagccttgcgaacctcgtgaaggtcatcgagtcgggcctcatcagcgagacggtgacggagcgcttggtgcagctcgaagagcagaagcgcgccctgaacgaggccatcgaggccgagaacatccgcgccgcgttgtgcgaggacgagcacactatcaaggcgtacttcgagaagttcctgcacgcggacttcgacaatcccgagacccgcgaccaggtgctggagtatttcgtcgataagatttacctaaccgacgacgggctggtggtgacgtcgtggtattcggaggacaggactgaaatcacgtgggacatgctatgcggggaggacggcaacccttttgttaaaggggaagccgtcaagttcgactgcttcccctttggctccaccaaaacgaataaatccgaaccttgtgccgattggcaatgggttcggatttatttgttatgccagtaaaaatattgtttgttcaataagcgggtatacgccgtgaaaaggcggaattcctattatccgtgttttcggtattgaaaatgtgcggattcagcccccggctgccggctcggcatgggataatttcatagcgcttaccgtaccgcaatacgaaagtcgtatgcgtattacagaacaaaaattaggcgatatttttcacggtgcccgccgaagatgcgtacggactgttggaatgtatcgccaaaatcagcgcctggcatttctaaaaatatgaggggaatagaaaggcaatgagggcagagaggcctgtccttaaaatcgtatggggttctgtacaatacacaaaaaatatacgtcataatatgcgagattaacatgtttaaattttccaaatttaggaagtaaaattcctttatgggaaatccatttcctcttatgctaaaggcataagaggaggtgattccgatggagcaaaacggaccgaaaaccgtgatgtatctcagcgccgtaaaggtgcgctcgaaaatctgcacgagcggtaaagcgcagagcgagatcgcggaatggtgccggtgctcggagcggcaggtccgaaattggtgccggaaaaacaccaatatttctgtggcaaatctgtacgccctcgcagattgtctaaattgcaagccggaagatctgctgatcgcggtagagattccggaaaataaggtgtaatcctcaggagagagcgaggcggcctacaatcttgtggccacctcgctcatctttgcgtttacatccattttaagccttcgacgcaggaagaaattaaccggataaaacagcccggctgacggccacaaagaccgggctgggagaagacgacccatccatcctgaacgggaatctgcaagtgttggatggtcatcttgaggaatgcccccgaggtgactttgtatgcttccggccagacggaagaaaggcgggcaaatgctgcgtttccgtgatcggggaggtgcggagaatagacgaaattcccggacagattatccttttgatcggggagagatacccttttacagcatctgcgatatgcagagcgaatggttttcgcaggtgtaattgccgcagaaagcggaagtatgtcctcttcagtctgtagaaaaacctgcaccagcatcggctggggcaggtttttatttgtaaagaagaaagcagaagaaaaaaacagcgcaatattgaaggttcctttctcccctccaaacaggtccctcattctcgctgtagcatgcccaaaagaaaaaaagggacgtttcggaatgcttgcattctgcaacgcaccctttagcttgtccggctgtggcgtgtttgttttttcgaatgaagcggcagagattttttccttctgccgccagaaaaagtagactttttcgttctcttgtgttataatgcaaacaaaagcagtttctatataaatagcagagagattatgtgattttgaataaaaaatccttgaaatttcttttattgcttagttgtttgcagtgaacgatatttcctgatttttccttcaacggaaagccggtcaactaagatctatgaaagccctctgctatttcgtatgcgagactacgcttaagctaaagaaaggaatagaggttgagacaaatgaagaaagcttcaaaaacactcgctgtgcttttgtctgtgctcctgctgttctcgttcggcacgacggtctttgccgacgaaacaagcgcaccggacttcgatgccgccagctcctcgacggaaagcagcgcagagccttcggacgagccctcggcagctccggagacatcggaggtatcggagtcatcggaggtatcggcaccggagagtgcagaaccggaaacctccggcacagagagttccagcacggaatcttccgaagaatcggctgtaactgaaaccaaagtacagacctatgccaatgcaggggaagaacctgtggcaaaaatcggcgaaacgccgtatgccagcttgcaggaggctgtaaatgctgcctcggcaagtgatcaggcaaccacaattacccttgtagcagatatcgctgacattcacgcatccgacattgttaccattccgtctgaggccaacttgactttggatatgaatgagaagaaaattacggttgccagcgattttacaggaaggcctctaattaacaggggaacgctcactatcacaggcaacggaaccattgatagttctgcttctaacacaggtggatacggtgccgtggacaattacggtgttttgaccattgaaaacggcacgttcaccgggtctgtcaatgccagcggcgcttctattaagaatcgtcctgatgccacgcttactatttatgacggccttttcaacggtgcagtcaccgccgtatataatgccggaaagacctatattcacggcggtacttttgactgccggtcctgctcaaaccaaaactgcaatcctaacagttggggctatacgattcaaagccatatggatatcgatgggaaatcgcctgaattatacttctatgacggaactgttatcggcgttcagggcgccttttccacttcggccggttattccgaaattcaagacggttcttttaaaacagtgccttgcagcaagcagccggatggcagcactgctttttatgcactgtatattgccggtgaatctggtgaagtcgaaagcaatatttatggcggaacctttgaatccgcttctagagttgcagcgttcatcggaaacagtaacgatggcggcgataagctaaatgcaattgcacatttttatggaggctctttcacttccggtggaaattctgaagccgtacatgtagattccagtttaggcggactcgaaattaccggcggcacctattcctctgatgtcagcgcctatactccggacggctatgcaagcatcgatgcggatggctcctttaccattaagcccgccaccgaaccgacagacgattctgcggcagaggtcggcggcatctactacaagagcgtgcagaacgcggtcaacgcggccgacgacggcgctgtggttaagcttgtaaaggatacagccgaaaccatcgtcgtttccgaaggacagaacattgtcctcgacctgaacggcaagaagctcaccggaaacacttctgcgcacacgatcagtgtggccggcggcacgctttccgtaaaggacagcactgctgaaagtgcgccttcggtcagcagcgattataaggtcagctatacctccggtgctgtcgaggcttcttccaaaaatgctgtagctgtttatggcggcggcagcttcacgctggaaagcggcacgcttatttccacaggaaactgcggcatttatgccggcgcctctgacggcgggagcggtacggctgtgatcaacggcggctatattcacgcgagagaatttggcgtcggcgtcatgatggaaggctccagtgtgacggtaaacggcggcgtaattgaagctgacgacaatgcggttgtcgccggcaacggtaccaaaggttacggcggcaccgagatcgacatcaacggcggcacgctgatcggacatattgagaccggcggctatatcgcctgcggtatctatcacccgcagagcggcatgctgaacatttccggcggcacgatttatgcggacaacggcgtcggtgttctcatccgggccggctcggccaacattaccggcggcgaaattattgcaaccggcataggtgacggcaaggtcggcgacagcacagttccgagcggccactacggcgttttgtttgatacgtcgagcggttacggcggtatgacagatcaggacgttgtgaaaatcagcggcaatgcctccatcaagtccgaggagccgagcctgtctgtcaccgattcggacgataaccatcgcattgaggtgtccggcggcactttctcctccaatgtaaaggatttcgtggttgagggcaacaccgccgttgaagacgaaaacggcaacttcgtgatcgcggcagacccggaaacggctgtcgctgaaatgaacggcaagggctacatgagcctgcaggaggccattaccgccgcaggtaccgatgcagcggctgtcaaactgcttaagaatacaaaagaggacgttgtgattcccgagagcgcgaacatcacgctcgaaattccggaaaatgtcacgctgaccaatgcttccggccacacgatcaccaataacggcacattcaaactaaccggcaagggcacgattgacaacacgacccatgcgagaggtgcgcttgtaaactacggcacagccgtgctggagggcaccacgctgacccgcagtgccgaagccagcaccagtgcaacggataacggcggcaacagctggtacgtaatttataacggtggtgaaatgaccatcaccggtaccacagacgtcgtgaataagggctattattcctccctgatctgcaacaagggcgagagcgccgaatcccccgcaagcctgactgtaagcggcggtacaatcgagcagcagaactttatcgcggtcaagaacgatgacttcggtaagctctcgatcacaggcggcgagatcagcagcgacgatcaggcggttcagaactggtccgacgcggagatttccggcggtacactcaacggcaacgtctccacttgggcttatgacggcggcgccgcaagcaaaactgggatttccggcaccgctgtgatcaccggtaacgtcatggcggtcaatttcgacaatcaggatacgatcccgacggttgtcattcagggcggtaccgtgaacggtaagctggaaaaagccacctataataatggaattgttccagctgacccgacagcggattcttccgctatcgaggtttcgggcggcagcttctccgaggctgttgacgaggcgttctgtgcggaggatttccatccgaataaaaacccggacggttctttctccgtgcatgagcataccttcggctcgtggcaggtaacgaagcccgccactaccaccgaaaagggtgaggagcagcgcacctgctcgatttgcggctttatcgagtcgagagaaatcccggttctcgataagccggttgagccgtctgcgaaaccgtctgcggcgccgacgactgcgccaacagcggcacccaccacggcaccgacaactgcacccaccacagcacctaccgctgcaccgacaactgcgccgacagcagcaccctctgctgcaccgacggagaagcccgcggtcaatacaccgcagaccggcgacgagggcgtgtccttcgtttggatcgcactcgtactgacttccggctgcgcagccgcagcactgcttctcgctaagcgcagaaaaggctgaaaataatccgtatcaagcacaaggagcccgcaggtgaatttcctgcgggctcctcagcttatcgaaaagggtttttgtatcttcataaaatattattgtgtgaatagaatgcgtagcaaaatcccaaagttctgcaatgcaccttttttctacgggctgaaaccggctggattgatccagccggtttgaatatagcctttattttgcccatcgggtatccaagttttgtttgtacttttaccttaccagcattttcagagaaaaatctcaaatacgttttttcttcctgccggcatggtaaggtggaattgcttttgcagatcgctggcaaagggggtgtcctccgaccggtatgcggacgggcggcaatctgatgcgagcggccaccggcgcgcctgctcggttgaggggtgcacagactcggatcatcagatgccgctcatacagcatgccggtacaccggcgaccggcacagcggcgcagacttacgaagcattcggatataaaatggcggacatagacccggacgctcacgattggaataaccctgtctgtgcgtggagcaaggacaatcaatcctgcaccaccgcgcatgtctgtaaaaacgatgaaaaccgcgcggaagcggatgcagacgcgataatcggcagagagaccaaagcgccagcctgcacggaaaagggagagaccacatatatgaccgcattcaatgtggattgggcaagcgaacggagtaaaaccgcggcggatattcccgccagcgggcatacatttgtgccgcgcgcggaaatcgcggccagccaccagacaggcggcacagcggcgcatttcacctgcaaaaactgcggtttgctgttcgacgcggagaagcgcgaaaccacgccggaggcgctggtgctcccgaagttcgaccataccttcggcgaagcgttggaatccgatgcagaggcgcactggtacgcgtgtggggagaaatctgccgtattcacccgcacctttgcgtgaatgacggataaggaagcggaaatcggcgcggctcttacggcggcataccgcagaaagaaaagcctgacaaatcgataaaagcgcagaacagcctcccagcgaacgcgtaagccgctgggaggctgccgcttatccgcagaggatcggcccgccgcgctcttgacagaatttcggatgcggttataatgaaagaacagcttacaatatcgaaaggaagtttttaccatgcgctgcccatatctgaaacaacagggaaccacaaaggttctgatggtccacgataaaccgtttgtcatgctggccggcgagctgcacaattccaattcctccacgccggaggccatggaggcgagctgccaaaaggcggtggaacttggaatgaacagcgtcatcgcgacgctcagctgggagctgatcgagcccgaggaggactgcttcgatttttccacagtggatatggtcgtggagaccgccagaaaacacggcctgaagctggaactcatctggtttggctcatggaaaaacgcccagtgtgcctatgcgcccgcgtgggtcaagcgggatctggagcgcttccccagagcggagatgcaaaagggaaagcgcagcggcaggatggagatcctcggggcggtgaattactcgacgctctcgtacctcggtgaagaaacgcgcgcggccgacgccaaggctttccgcgcggtgatggcgcatatccgggaaatcgacagcgaggaaaacaccgtgctgatgatgcaggtggaaaatgagactggcgtgctcaccgccgcccgcgagcattccgcccgcgcggacgaattgttttacgggccggcccccgcggcgctggtgcagtacctgaaagctcacaccgagaacatggccgccgacgtcaaggccgaggtggaaaagggcgcggaaacaggcacgtgggaggagtgctttggcgccgtggccgaggagattttcagcgccttctgcgtttcgtcatatgtcaacgcggttgcgtcggcgggcaaggcggcctatgacattccgatgtccgcaaactgctggctggagcagggcaaggccggcgattatccgagcggcggccccgtcgcccgcgtgatggaggtttggcagttctcagccccggccatcgacgtgctggcgccggatatttatatccccgctttctgcgcggtgtgcgaggaatacacgaaaaacggcaacccgctgtttatcccggagatcgccacgcacgcatatgccggcgtgcgccagctctacgcggtgggccgccaccatgcagtctgctacgcgccctttggctttgaggacatcggcaggccgttcctcggcatgtccggcgtgggaatggatctgaccgatcccgcactcagcacccggcaggacgccgcggagtaccgggagatcaccgctgcactgcgctccatgctgcataagatcgcgccgaagctgggcacagacgatttgcaggcggtttcgagcgaacagggccgggagcagaagctcgttctgggtgactttgggtttaccgtgaagatgggcgcggacggaacggcgcgggagcaggcgcccggcggcgcgctcgtcctcaaggaatcggaggatacattctggctgctctgcgtgaactgcgcgccgacgccgttttcgaatgtgccgcagaagccctattgggattacctcgacgtcgaggagggctatttcgaggccgacggccgctggcatgcgacgctccgccgcaacggtgacgagatcgcagttatgcgcttcggcgcgccgacgatcctgcgcgtgaagctgtttgcctatggggactgagcgctccggcacagcggagccgtatctgcgggccagaggcgcgtcgcgagatcctcgcgggcgtgtgccggaatggggcggcggttttcggaccggccgcccttttatattggcgcggctcgggttcctgagtcgcacaaaaaggaacggcttgacaaaagccttgaagcctgttaaaatacatataaatatgaaattcatacttatatgtaaaaggagcgcggactatggaagtaccaaaggggcattatatatttggaaccgtaaaggtcggtgagcggggacagatcatcatacccaaggaagccagagaggtctttcagatcaaggccggggacacgctcatcgtcttaggcgatgaaaagtgggggatcgcagtcacgaagtcggacgtactcgaaaggcacgctaatgcggtgttcaagaaaatttcgggggaaggcgaggggaaagagccatgaacatcggtgaaacgacgctttcctttttgcaggaggactgcgtgcgggaattcggggagaaagacggcgagcggctgttccgcctcgcggagcaggagtaccagaggcttctgtgcgcggcggattataggaacagcggggcggtccgcgagcatctgcagaaaaagctgttcccgccgatggcgtattacaaggcgctttgtgcggcgggctatgcgaaagaggccgcgctggattgcgtgagaaaagaaacgcgcaaggccgcacaggcgaaacgggacgagatgcgcgggctggtgcagatgccctttgcgtattcgatttacagaatgggcgtcaaaaagcacatgaagaaaaatttccccgatgcgggctgggagacggagtgggtctgctgcaatggccgcgagatccatttcaacctccgccgctgcatttattgggatctcgcgaggcagtacggctgtccggaattgtgctgcgtctactgtgaaaacgacgagatcgcattttcgggccttctgccgaagatccggttcgagcgcgccggcacgctcggcggcggcgcagcgtgctgtgactttcacttcatcaaggcttgaagctgccggaatcaaagccggatggattttttaagggcaagggccaagagtaattgtgccgcggcggcaaagccgtctgccggagaatccccgcgcgattattttaaaagcagaggctgtgtgcagcgcgcagctagatgccggccagacgcgttctgcggcctgcacagccgctcggttgagcaaagcattatttttggaggcaatcaaatggtcttatatttttcgggaacaggcaacagcgcgtatgccgcaaaacgaattgcggcgaagctcggcgatgaagcgaccgatctgttcggcagactgcgcgcccgcgactacacgggcatgcgtgcggagaggccgtgggttgtcgtggttccaacctatgcgtggcggattccgcgtgtggtgcatacatggcttgcgcgcacggcgctcgagggccgccgggagatctatttcgttttgacctgcggcgggaacatcggaaacgccgggcagtatctggaaaagctctgcgccggcaaggggatgcagtttcggggctgcgcggcagtcgtcatgcccgacaactatatcgcgatgttttctgcgccgggccgggaggaggcgctgcggattatccggcaggcggagaaacgcatcgaccgggttgccggctggattcaggcgggagaggctctgccggcggagaaggtcacgcccgtgggccggctgaacagcggcattgtaaacgacctgttttattggacgacggtgcgcacgaaaaaattccgctcgacagaggcttgcgtctcttgcggcaggtgcgcggcggtctgtccgctcggcaatatccgcatggaaagcggcaggccggtttggggcgagaactgcacccactgtatggcctgcatcagccgctgtccgtgctcggcgatcgaatacggacagaaaaccgtggggaaggtccggtatgtctgcccaaaggaactgtgagcggtgcggtgcgctgtacagcgcaggcaaggccgaataaggccaccgcgataagagaacagcgaataacagaaaaagacgagatcctgatggcgggatttcgtctttttctatcggttcattttggaaaaggtgcagcggcgggattgagagcgcggcgtaaatgccggcggcgcttcggatcacaggaggcactcgagctggcggtcatagggctcgcgctccacgtgcgccgcaatcggctcttccgcgtctacacagcccatcgcgctgtagaaggcctgcgtttccacggccgaatgcgaggagatgtacagcttctgcgcgccgtgcgctttcgcccagcgctttgcctcggcgaacaggcgccgcccgatgcccgcgccgcgcatatccgcggaaacgtggatacagctcaggtcgagatactgcccgcggctgccgagcggctcaggctcgacagaggagaagcccttgagccggccgtcggaaaaggcgccgagcacgaggccgccggtgcgcgccgtgttttgcaggcattcgcagagaaaggcgtactcctcggcggaccaatcgtcgatgaagggcgcgtcaacggatgtccagccgtttttcgaccggcgcagaaccttctgcacgagctgctttcgctcgaagtgcaaaaagagcgccggtatgatttcgctttcgttcagtgttctgtaaacggtcatttgggtgcctccattccgttaagaaaaataattggtgaatttttatcgcagttcaattcgaagaaaagaatttttattataataaatttaatcggaaatgcgaatttttatcggcggcggtgaagcggcgcctgcgggccgcccggtctgcatcggtgggttcttaggcagtcggcggctggccgcgccgccagaaacagacaaagacgcggcgggccggaaaaatttcagtatgaaattactttttttgatatttctcgcgtggatccttgtggtataactaaatcgattgaggtgaaggaaaatgaataaagaccagcttttagaccgatatgcgcgctggacagaacgatgcggcacaacggcgctcaggacggatctcgacaatgcccgtgagctgctttcctatgatgcgcctgcaccggacgggcttttctccggtgtttcggtgcgggcgatcgccgtacatacaaatcgcgtgcatgtgtttctgtttgcggtgcggacgatgtgggcgtgcgacagcgaaggggagccggaggcggagatccgccggcggtacaggctgatcacctctttttagcagttaaaattctggcttgtagccgagcggcgtgcctttctgcgcggcctcgcatgcaggagagcctcggctcgatcacgcggagcctgtcgtttttttgtgtgcccgtcctatagccgccagcttttcaaaaacaaacgcaaaaatcaggctgaaaagaacgccgagaacggtgtcccagacgcgcaggagcacggcgccctgaaggccgtagatcgcggcgccaagcgacagcgcgccgaagcagttcataatggtcttggctaaatagttcgtgcagaagcccagaaggatcccgcccaagggcgccaaaagggaatggaaggcttccggtgtcgcctgaaacaagatgaaaaaggccgcagagccggtcagcacgccgaaaaagcgctggagaaagcggggggtcacccggccggaataggggtaagcggacagaattgaggtgcaggcaaagcccatccacataaaccgctcgatctgcaaaacgcgcccaagtgtgagaatcaggctgattgcgagcgccatgcgcagctgccacaggtgcgccgcgtttgataggctgaaattccgcaggatgtggtgaaagcggatggcgctgtgcgcgctgcggtgcttcaggattaaaaccgcggcgcagataatacagccggtcagggtgaggagcacgcgccggatcagcgcctctccgaaaacggggttcccgacaagatagatgtacgcgaagctgtataggccgccgtttccgagctccggctgctgggctgtcataaagagcagagagaaagcggcggccagatggatcggggcgacgagcgcggcaggggcgcgggcggctaggcccggcgccagcagtaaaaccgcgagggaggccgcaagcgcgagcagagaatcccggatgcagtaggagaagttcacaaagcggatggaaagcagcatgcagaacagcacgaccgccattggcgagttttcagcgccgaatagactcgtgcctgcgccgataaagaggattgcaaagcccacgagcaaaagcgcgcgtgaaaggagcgccagacgaaaaaagttcttttccctttgggattcgctcgcccgaatcctcgcttttaaagcagccggatccagctgcagggcgtcgtaaaaagacatgctcaatccgcgtctcctttcttttccgccatctgcccggcgattcggccggcacattttaagaaatcctcgaaatccgggccgatgctccgccaaagcgtgtagaagggctccagcatattttcgcagccgcgctgcagcgccgtgcgcccggtttccgttagaaacagccggtagctccgctcgtcctgcggctgcttttcctttcggatgcagcccttttcaaacagttttttcaggcagcggctgaccgcctctcttttcatcccgctgcattggctcagcatgacgggcgtgttcttttcggggtgtaaatacagccacgccagcagctcgcattcgctgggcgtgagaagctgctttttcacggggaaaagataccgggatattttttgcagcagctgctggtagcgtaccatctgcatccagtcgatttccaagacaatcaccgccaaaacaaattaacggtgttaattatatcaccggtatcctatcttgtcaaggctccgggataggcattccgcggcgatttgcgcagaaatgccgtgcagagtaaaaagaggacgtatgaaccgctgcctttcgtgcggttcatatgtccttaaaaacatttattttgcccaagtaaagcattcttttcctgcaccgatctcaaaatgatatttgacgatacccagatccgttttagaatagaagccgcccgaggattttgccgtgacggtgttcccgctgagagaaatcgtaaatttctgctgattcatggctgtgggggcgagcatggctgcctccatgcccctgcggaaccattccggcatcgcacccgcagccgggcagagagtctccatgggtttgctcttgtgggcggcgccctgcgtggcgccgtagccgagggacagcacgcatacgagcttttccccgggcgcgagggtgcagcggctcttggccgcgcccttgccgaaggtcatggccacccagcaggtgttgagccccagcgtctgtgcaagcagaaccagccgctcaccgtaataacccaagcgctcctcaagaccggcgctctttttcccgataagggcaatgtagttctgcacgccggagaacttgccgtaatgggccatgaagctgtcaaaggccttgggctcattcgttacaagctggatgtgcaggccgtcctcctcgttgcaggcgtcgatttccttttgcagggtcagaatgtcctccggcttcaacgggatatttttgtagctgcgcaccgaatggcgggtttgcatggcttctaaaagcgtcataataatcatcctttcactcttccaaatgggggtaatggacccgcgcggccgcctgcgctacccgatacacgtggtctaccagcgccttgatctcgccccatttgctcaggttggcgtccacatagtagtagttcatggtgcctcggcggtggacattgaccagcccggcatccttgaggatgcgcaggtgatgggatacggcagggcgggaaagatgggtgcgccgggtgatttccggcacgcgcatgcccacggtttcgtgctccagcagagcgataaagatctgctggcgggtctcatcgcccagcgcagcgaaggcgctttgcagtgtcttaaattcctccgccagagactgccgctgtgctctgcactcgtccatagctgtcctcctttttgaaagcccataaatatgtacaatggtttaaacgcttaaaccattatagcacagctttccctttttggcgcattgggaaagaaaatcgagacgaataatttgctgactcgatcgggaccggtgaccagtaccggatgctgtttagagctgcagggatgatctgcgtgcagaaaggcccgaggaaaatcaataccagcgcggcggcagagagggaaagcgcccgaagcattcgtatacgtccggcttcataagggcgcggtaccggaagaaatgaaaaagcaaaggcagcctcggccgctggagctatatcaaaacagcctgcaatcgcctgtgttcaaagaaatggcgggaggccaaaagaatcggccggggcgcgatcataccggactttggatcatggctgctgtcggggctgtatttgtttctgtggtttggtattcttattgcaccgtatgccgatgaagggcttccgcgtatcctagcgcatatcgggccggcgatcgaccatccctttgaccgcagatctgcgcggatatcggcacatccatccttgtgtgttgatctatgtatttgctctggctattgcatttaatccgaaaaattatctttttgaaaaaatcttcaaaaatcgattgacaaacatgccacacagtgctataataagcaagtcgtcaagcggaaggcgtttgataaacaaaatatgcaggtatggcggaattggcagacgcgtatggttcaggtccatatgaatgcaagttcatgcaggttcaagtcctgttacctgcaccaaaacaatcaggctattcgagtttcgaatagcctgattgttttaagatcattttgtcgaaggaagattaagcttcttccacgcttttcatagttttctcttcttatcgagaattccggcataccttacttgtctccatcaggtagtgcagagatcctccctgcgtcccataaagtaatgattgtgcttacaccgttatagcgtcgggattgtgtattgcaaggtgcgctgcgcgaaatgcacagtccatgctgtacgggatacgcggtctatcaccttgtattatgaccgcctcagtcggcagtcctctgggtggagttgtcgagattcagtgttagtcgccctctcggatgtccgggattcacggcatgaaaaaagcaaggttttgcgatacaacaaaaaggaaaatctttatatttaaagtatttctctttttgtgttgtgtcaagatgcttgacgaaatttattcacaaattcagtccattgttccatatttttacgcgaaagcctgagttcataggagctcaggctttcgcgcttttgggataatcagctttttcttaccaatgaaagtagcattatttttgaagaaacacagcataatttttccgaattttggaagtaaaattcctttatgggaaatccatttcctcttatgctaaaggcataagaggaggtgattccgatggagcggaacggaccgaaaaccgtgatgtatctcagtgccgtaaaggtgcgctcgaaaatctgcacgagcggtaaagcgcagagtgagatcgcggaatgatgccggtgctcggagcggcaggtccgaaattggtgccggaaaaacaccaatatttctgtggcaaatctgtacgccctcgcagattgtctgaactgcaagccggaagatctgctgatcgcagtagagattccggaaaataaggtgtaatcctcatgagagagcgagacggcctacaatcccataggccgcctcgctcatctttgcacctattctgggaaaattgtagattttttcaaaaaaattagagattatccgtgctgtccgaaacgaggtagcacagcgtcatcatgctgtcgctcaggtgtaccgtttctacgacggcgtccttgtagcgcggtgcaatgtcatacgagctgaaattccagtaattgcggatgccgagcgcatagagctggtcgacagcgccctctaccgcggcacgcgggatgcagaggatcgccataatgggctgctcatccgtgcagaaatcctcgagcgccgtgtaggggagaacggaaaggccggcgagctcacggtcggagatgtgctcgccgctgtcaaagatgccggtcagcgcaaatccggcgaggttgtttgtgatgtgcgtcgcgatcgccttgccgaggttgccggcgccgagcagaatgcatttgtgcttgcggccgaggccgagggtctcgccgatctcctcgcgcagctttggcacggagtagccgtagccctgctggccatagccgccgaagcagttgaaatcttgccggacctgtgaggccgtaaggccgagtttttcggaaagctctctggaggatgcgcgcaggataccgcggcggtcgagatctctcaaaaagcggtaatagcgggggaggcgccggatcacagacatggaaatatgcgttttcttttgcataaaaatcagacctccctgttttgattaaaaattatcaaattcttttattatatctattaaaattgtaccacacccaagtgtatactgcaaggcgcaattatagacaaaaaaaccgccggctaagacacagccggcggcaaaaatgcagtattaaagcagtttttcgagcctgtcgcggatggcgagcaggaactcctcagtattgaccttcgtgatattttcgagcgtggacatcgaagcgaggtcgcccgtcatcacaccgtcctcgatcgtctgaatcgacgctttttcgagcttgtctgcaaaatcgacgagcgcatcgatgcggtcgagttcgccgcgcttgcgcagcgcaccggtccatgcaaagagcgtggccatcgagtttgtcgaggtcttttcacccttcaaatgcttgtagtagtggcgctgcaccgtgccgtgcgcggcctcgtattcgtagataccgtcgggcgagacgagcacggaggtcatcatcgcaaggctgccgtatgccgtagcgaccatatcgctcatcacgtcgccgtcgtagttcttgcaggcccagatgtagccgccctcgctgcggataacgcgtgccacggcatcgtcgatcagcgtgtaaaaatactcgatgccgatctcggcaaatttttccttatattccgcatcgaatatttcctgaaaaatatctttaaagcggtggtcgtatgttttcgaaatcgtgtctttcgtcgcgaaccagatgtcctgtttcgtgccgagcgcgtaattgaagcaggcgcgcgcgaagctgccgatgctcttgtcgatgttgtgcacgccctgaatgatgcccggcgtgctgaaattgtggatcgtccggcgctcctcggtgccgtccgcctttgtgacgacgagctccgcctttgctccggcgggcacggtcatctccgtattcttatagatatcgccgtatgcgtggcgggcgatcgtgatcggcttcgtccagctcgggatgaacggcgtgatgcctttgacaaggatcggcgcgcggaacaccgtgccgtcgaggatcgcgcggatcgtgccgttcggcgatttccacatctctgttaagttgtattcctttacacgagcggcgttcggcgtaatggtagcgcactttacagcgaccccgtatttcttcgtcgcctcggcggaatcgatcgtcacctgatcgtttgtcgcgtcgcggtgctcgaggccgaggtcgtagtattcggttttaaggtcgatatagggggtcagaaggatgtccttgatcatcttccagatgatgcgggtcatttcgtcgccgtccatttcgacgagcggcgtggtcatggggatcttcctgaaatcagccatcggtcatgctcctttttattaattacttggagagggatttcgtgtagttcagcaggccgccctcgacgaccatcgcgcgctcgcggtcggtcatcatcggaatgacctccatctcgatgcccttggtttcgtcgcgcagcaggatcggcgccttgttccggatcgcactgcggatatccggcagcgtcagcgtgtccatctggtcgatgcggtcgtagtcggcctcatccttgaagcgcagtgcgaggatgccggcattcgcgaggttcgcgcagtggatgcgcgcgtaggattttgcgacgaccgccttgatgccgaggtagagcggcacgagcgcggcgtgttcgcgcgaggagccctgcccgtagttggagccgccgatgatgaggccgccgccctccgccttgcagcggtccgggaacgtcttgtcgcagaccgtgaagcagaagttcgagagatacgggatattcgagcggtaggggaggatcttcgcgccggccggcatgatgtgatcggtcgtgatgttgtcgccgaccttcaagacggcctttgctgtgatgctttccgacaggggtacggagaccgggaacggcttgatattcgggccgcgcagcacctcgaccgtctcggagaggtagtccggcgcgggctcgacgatcatgttgtcgttgatgaggaagctctgcggcatctcgatcttctcccaaccgccgagcgtgcgggggtcggtgaacatgccggtgagcgcggaggccgcggctgtttcggggctgacgaggtagacctgaccgtccgcggtgccgctgcggccctcaaagttgcggttgaaggtgcgcagggagacgccggccgagttcggcgactggcccatgccgatacaggggccgcaggcgcactcgagcacgcgcgcgccgctctcgatgatgtcggcgagcgcgccgtttttcgcgagcatgttgtaaacctgtttcgagcccggagcgatcgaaaggctgacggagggatgcacggtcttgcccttgaggatcgcggcgacgcgcatcaaatcgaggtacgaggaattcgtgcaggagccgatacagacctgatcgaccttgatgtcggagagtgcggaaaccggcttcacggcatccgggctgtgcgggcatgcggcaagcggctcgagcgccgagaggtcgatctcaatgacctcgtcgtacgcggcgtcctcgtcggaggcgagcgccttccagtcggcctcgcggccctgcgccttcaagaacgccagcgtgatgtcgtcggaggggaagatggaggtcgtcgcgccgagctccgtgcccatgttcgtgatcgtcgcgcgctcgggaaccgtcagcgtgcggatgccgggaccgccgtactcgatgatcttgcccacgccgccctttacgctcatgcggcgcagcacctcgaggatgatgtcctttgcggagacccacggggaaagtgcgccggtgagaacgatttttgtcatcgtcggcatcgtgatgtggtattcgccgccgcccatcgcgaccgcgacgtcgaggccgcccgcgccgaaggcgagcatgccgatgccgccgccggttggggtatggctgtccgagccgatcagcgttttgcccgggatgccgaagcgctcgagatgcacctgatggcagatgccgttgcccgggcgggagaagtagatgccgtgctttttcgcgacggtttggatgtagcggtggtcgtcggcgttttcaaagccggtctgcagcgtgttgtggtcgatgtaggcgacgctgcgctcggtcttgacgcgcggcacgcccatcgcttcaaattcgaggtacgccatcgtgcccgtggcgtcctgcgtcaatgtctggtcgatgcgcaggcccacgtcggcgcccggcgtcatttcgccgctcagcctgtgtgcctgaatgattttctgtgcaatggtaagtcccatttcgatctctccttcggatagaatctgttcctattatctactatttatacggaaatgtcaatgcaaaaccgacaatttttgcaggattttaaaaaacgccttgcaaaacaggcgtgaaatccacgcggaaaggccaaatttctttgtgggattgcggtgcgatacatgtattctgacagaaaaccgtgcatccgcggaggattctcctgcaaaatctcccatattattcttgcggttcccgcggagaagtgctataatgatacgcgtgtaaatttgtgctttggcggcaaattgcgctttggcgtatgattctgcgatttctcctcagactatacgtatcaaatgcaaggagctgtagcgcatgaaaaacacaaaaaaaccggcgctttattccgtcggcgacgtcgaacccgacgagattgccgaggaggaagcggagcgccagaagcagatccgcgaaagcgggtcggtgatcacgcggaaccgcaagcgcaccatccagtgcctgacgatcatcgggcaaatcgaaggacattacatcgcgccgtcgcagaacaagacgacgaaatacgagcacgtgatcccgcagatcgttgcggtagaggaggacccggagatcgacggcctcctgatgctgctcaacaccgtcggcggcgatgtggaggcggggctcgccattgcggagcttgtggccggcatgaaaaagccgaccgtttcgctcgtactgggcggcggccattcgatcggcgtgccgctcgccgtggcggcgaagcactcgttcatcgcgccgtcggcttcgatgacgatccaccccgtgcgcatgaacgggcttttgctcggcgtgccgcagacgctcgaatatttccagcgcatgcaggaccgtatcacgaatttcgtcacggcgaactcgcatatctcgcacgagcgcttcatgcagctcgcgatgaacacgcaggagctcgtgatggacgtgggcaccgtgctcgacggcgacgaggccgttgcggagggccttatcgatacgctcggcaatctgcacgaggccatggactgcctcgacgcgatgattgcggcggaaaagaaaaagcaccgcagcgaggcgcagcgcggcacggggcgcggcaagaaaaaatagcatgtccgaaaacggtcgcccggccgttttacatattcggaaaattacaggtgagaaaaattgtaaaggagatcctacataatgtctatttgggaagcaattattcagggaatcgtgcagggcgcaacggagtttctgccggtttccagcagcggtcatctttcgctctcgcagcacattctcggcgtgcagctcgacagcctgctctttgacatccttctgcatctcggcacgctgatcgcggtgctcgccgtctattacaagcttgtctggcggctgatcaaggcgtttttcagcctcgttgccgacctcgtgcacggccgctttaagtggaaagagatggaccacgaccgccgccttctgatgatgctgatcatcggccttgtgccgctgttcctgctgtttctgcccgtgcccggaaccggcatgaagctgaaggatatttcggagctttgggcgaaggacacgaccatctggatcgagggcatcgccttcctgatgacgagcgcgatgctgttcctcggtatccgcatgacgaaaaagatgaagccgcacaaacatgtgagccgcgacggccgaacctccgaaatcaagggccgccgcaagatccacacgatcgacgctgtctgcatcggcgtgacgcagtgcgcggcggcggtattcccggggctttcccgctcgggctccacgctcgcgaccgggctcatgcgcggaatcaaccagcagaccgcgctcgactattcgttcgtgctcggtatcccgtcgattcttgcggcggccgtgctgacggtttcggatgtggcgggccagccggccgacatcggcgccggcgtgatgatcgcgggcgttttgacggcggcaatcgtcggcttccttgcgattaagctcctcaagtggatcgttacgacgaataaactgcaggtttttgcatactacacgctgatcctcggcgttgtgacgctgattgtggcggtcatcgaggcgatcggcggaaagaatctcttcaccggcctgccgctctgagcggaccagcgcccggaaagcattttggaggaacattttggcgggtaaaaagcaaagcacacagaaaaaaagcggacgtcctgcggcgaagaaaagcgcgcagagcaaaacggcgccgcgttcaaaatcgaatacggcaagaacaaagcagcaggaggcgcagctcgagcagatccgccagcgcaaccagagaaacgcgattttctggtttctgggggcggtccttgtcgggtgcctcgtgctgatcccgggggaaaatatctggctttcggcacataatatcctcaggggctttttcggcgactgggcgctgctgctcgccgtgctgatgctctacgttgcggtgacgaaagcgtttgagaaaacgggcctgtaccgcggggcgcggatggtgtttgtgtgcctgatcctgtttttctggtgtgccgcggtgcatctgttcggcagcgcggcgctgccggcgggcatgggcttttttgaaacgatcggctacctctacacgcgcggcgtggagcacggcggagccggcctcgtgggcggcatgctcggcgcgccgctatcgtcggcggtcggtgtgaccggcgcgcggatactcatcgtgattctgcttgtcggcgcggttatgattctgacgggcacttcgctcgtcacactgttccgcgcgatgtcgcgtcctgccgtgaagattcacgacgtcgcgcagcgccgcagggaggagcgccgcatgctcgaggagaaccgcagcagtatcgacgtgccgctcgacgcggttctgccgcagcaccctgtgcgttcgattcccgaggaggcggagagcgccggcgggaaaaagaagaaaaaagaaaagagcccgcagctcgagcgcctcgagaaggtgttcggcgtgaagcagacggagccggacagcgaaccggtcgtcattcaggaatttgaggaagctccaaaaggatacccggtggaaaagctgctggatgcaaaccagcaggtacccgatttcaaggtgccgcaggtggaggtcccggccgaagcgcccgcagcggcggagccgcagccggaggagccgccgcacatgccggtggagcgcgaggtcgttgaggcagaagctgtgccgcccgcacccgctgttcccgccgcgccgcccgcagggccggtcacagtcgccgaccacgcggcgcagaacccggaaacgattgccgaggccgagcgcgccgtggccgaatccatgcgcaggaagctcgaggcggaaaagctcgagacgcagccgctcaagggtgcgcgggccgcagaggaaagcagctactgttttccgccgatcacaatgcttgcctcgagcaaaaaggtggacgcgagcgtcgaaaccgaggagctgcagacgaacggcaaaatgcttgtcgaaacgctcaagagcttcggcgtgcagacgaaaattctcgatatctgccgtggtccagccgtcacgcgctatgagctgcagccggcggcgggcgtgaagatcagtaaaatcacaaaccttgccgacgacctcgcgatgaacctcgctgcaaccggcgtgcgcatcgaggcgccgattcccggcaaggctgcggtcggcatcgaggtgccgaacaaggcgaagagcatcgtgcgcatgcgcgagctgatcgagtcaaacagcttcgtgacgtcgaaaagccacctcaccgtggcgcttggccgcgacatcgccggtcaggtcacggtggcggatctcgcgaaaatgccgcacgttctgatcgccggcacgactggctcaggcaaatcggtctgcatcaattcgctgatcgtcagcctgctctataaatccggcccggacgacgtgcgctttctgatgattgacccgaaggtcgtcgagctcggcatctataacggcattccgcacctgcttgtcccggtcgtgaccgacccgcgcaaggcggccggcgcgctgaactgggctgttacggagatgctcaagcgatacaaaatcttcgcggaaaacaatgtgcgcgacctcaagggctacaacgccctcgccgaggcgaacggctatcaggacgaaaacggccagccgatgcacaagatgccgcagatcgtcatcatcatcgacgagctttccgacctcatgatggccgcgccgaacgaggtggaggacgccatctgccgcctcgcgcagatggcccgtgcggcgggcatgcaccttgtcgtcgcgacgcaacgcccgtccgtggacgttgtaaccggcctgatcaaggcgaatatcccgagccgcatcgcgtttgcggtatcctcggcgatcgattcgcgcacgatcctcgacggcggcggcgctgaaaagctgctcggtcagggcgacatgctgttctcgccggtcggcgcgcagaagccgctgcgcattcagggctgctttgtcagcgacagcgagatcgaatccgtcgtcgatttcgtgcgcaactcgaaggcggttgtctacgacgacaaggtcgccgaggaaattgagcgcaacgcggtcgccgagagcggcaaatccggcggtgtggacagcgcggacgacgagggcagcggcgatccgatgatgaacgaggcgatcaagtgcgtcgtagaggccggacaggcctccacctcgctcctgcagcgccgcctgcgcctcggctacgcgcgcgcgggccgcctgatcgacgagatggagcagatgggcatcgtcggcccgcacgagggctcgaaaccgcgtcaggtgctgataacctatgcgcagtggctcgagatgaacatgcagaaatcggacgcgggatgagccggcagatgaaagagacggagcggcttcggcgctgcctgcgcgctttgctcgcggcgtttgctgcggctctgctcattttcagctatacgccgccgggaaaggcggtgtgggcgcagctcatgcgcacggctgggctcgcgcactttaccgcggctttgtctgcggacgcgctccacgtccacgtgatctcggtcggcaaggccgatgcgattctgcttgaaagcccggaggctgcggtgctcgttgactgcggcacggcggacgcggcgcaggagatcttgaattatctcgatgcgcgcgggatcgatcggctcagcgctgtctggatctcgcacccggacgacgaccacagcggcggactttcggaaattgcgcagagcctgcccgtcggggaggttgtcgagtccgcttcggcggaaagcgcggccggctcggcttcgctgcctgaggcgcttcctgtgcgccgcacagcggccggagagtattttgcgtacggtggcatgcggctcgaggtactcggcccgctggaggattacgcggaggcgaacgacagctcggtcgtgttccgcttacagtacggcgatttttccatgctgttctgcggcgatatcgaggaagcggcggagcaggcgcttctaaaaagcggcgcgccgcttcgggcggacgtcctcaaggtcgcgcaccacggcagcaatacctcgacctccgcggcgctgctcgaggccgtccgcccccgatacgcggcgatctcgagcggcgaggaccggaacctgcttccgcgcaacgccgttttaaagcgtctggacgcggcgggcgcagaggtgttccgcaccgatacggacggcaccgttgtgttctcggcagcacagggagaaatcgcggtgacaacagaaaatgggcggtctgctttgccgcaggccgcagggaaaggatcagaaccatgaagaaaatgacgatcgaccgcttcgacggcatctatgccatctgcgaggataaggacaggaatttctttgcgatcgagctcggcgagcttccgcagggggcgaaggccggcgatgtgcttacggttacggacgagggtacgctggaaatcgaccgggaagaaacggcgcgccgtcaaaagcgcgtgcaggaaaagcaggcgaagctcctcggcctttaaggcggcctgcacgcagaagaaaagaggttttgccaaatgggacgtttgagttatatttttcactgcattgcgcacatggactacagggcgctgctcgagacggttggcaccgtgcacgggctctgcggcaaaaaccgcgcatggcttctgttcgacattacgaaatgcggctttaagttcggcgcaggctataaggactacctgctctgcgaattttttaatatgaacgacgcccagcgcgcgacatttgtcacgcgcggcatcaacaacacgatcacaaagatgctgaacgacccggcgtactaccacatcttcgacaacaagaatgagttttacacggtcttttcggcgtatctgcaccgcggctggctggacttcagcggaagcgaccgcgcggcgttctctgcgtttatggcgggcaaggacgccgtgatctgcaaaccgcgggacgcctcctgcggcgtcggcgttgaaaagctccgtaaggcggatttcacgtctttagatgatatgtacgactacctcgaaaaggccggggccgatatcgtggaggaggtggtcgagcagcaccccgacatgaaccggatcaaccccggctccgtcaacacgatccgtgtgtacacgatgctcgccgaaggcgtttcaaatgtggtgtacgcgtgcatccgcatgggcaacagcgaccggccggtggacaatatcaatgcgggcggtatgtattcgccggtcgatctggaaaccggcaaaatcgcctgcgccgcctgcgataagcagcgcattgtctatgagcgccacccgcgcaccggctgcgttctcaagggttatcagatccccttctgggaggaaacgatggctctctgccgcgaggcggcgtacaaggtgccgcagatggggtatgtcggctgggatgtggcgattacggccgacggtccgcttttcatcgaggcgaacaacctgcccggccacgatgcgtttccgcagatgcctttgcaggcgcccgacaaaatcggcatcctgcccgtatttcaaaaatacatcaaggggctgtgacggtgccgcgaccggcgcccggtgcttcggcgcgcagggagatgcggtccgccgcctttgcgcagagcttgcagagcgctgcggcggggatcgtgaggaagaaccatatggcggaaaacgggatgcagacttggccgaggatgttcatcggcagcgcggagtaatcccagacatgcaggtgcagcacccggttcacaaggatgccgagcgcaaactcaacaccggtgataatcagagagccggccgcacatcttgcggcgaggctctttttttccatgcgctcgcagcagatacggttgatcagcaccatgcacacgccgccggcgagcgccatggaggagtgtgtgtagccgcgccaaagcacctcgagcgtcgggtatgcgcagcttcccagaatgaatatcaggctgtttttcttcatcttgttcacgcgtccttatctgttttcttcggcgccgtgcgcaaaaggctgcatccggcccgatggcgcagaccggatgcagtttgtaggggtgccgcacgaaacttcattatgccgtcaaaattgagtatgcgcagtttcgggcgcgttattgcatgcggcggaaaaagcgcgcaaaaaatcctgtgaaaaaagaggcaacaaaaacacaatgaattcgcatcaaaatgcggatgccgggggctgtacaaaacggggataaccgtgtataatttaggcagataagaaatccggttacaaatgagaaaggacggaagaactatgagaattctggttacgggcggcacgggctacatcggcagccacacctgcatttccctgctcgaaaagggctacgacgtcacgatcgtcgacaatctcgtcaacagcaaggcgctcgtcgtggaccgcatcgaagcgctcagcggcaaaaaggtgaaattctttgaggcggacgtctgcgatgccgcggcgctgcgcagaatttttgctgaggatgagattttcgcagtcatccattttgcgggtctcaaggcggtcggcgaatcggtgcagatcccgctgcgctactacgaaaacaatctggtctccacactgagcctcttgcaggtgatggaggagttcaaggtcaaaaactttgtgttcagttcgtccgcgacggtttacggcaaccccgcttcggtgccgatccgcgaggatttcccgctctcgacgacgaacccctacggtacgacgaagctgatgatcgagcgcatcctgctcgactacgcccatgcaaaccccggtttcaacccgatcatcctgcgctatttcaacccggtcggcgcgcacgaaagcggcacgatcggcgaggacccgaacggcattccgaacaaccttgtgccgtacatcacgcaggtggcggtcggaaagctcaagtgcctcggcgttttcggcgacgattacccgacgaaggacggcacgggcgtgcgcgactacatccatgtggtcgatctcgcagaaggccatgcggcggcgctcaaaaagtttgaagaatcggactgcggcgtgcgcatctataatctcggcaccggagtcggctactccgtgctcgacatcgtccacgcctttgaaaagtgcgtcggccgcccgatcccgtatgagatcaaagcgcgccgcgcaggcgacatcccggaatgctatgcggacagcacgaaggcgttcgaggagctcggctggaaggcgaataagacgcttgacgacatgtgcgccgattcctggcgctggcagacgaagaacccgaacggctatggggaataagccgccgcgtctgattctggcctcctcgtcggtcaaccgccggcagattctcgaacgcgccggcatcgcttttgactggatagcttccaatgctgacgaaacagcagcggggctttcgccggaggcgctcgtgctcgagctttcgaaacgcaagctcgaggcggttctgccgcgctgtgcgccgccggatgtcgttgtggcggcggatacggtcgcgtcgatcggcggcgagattctcggaaagccgcatgacgcggcagaggcgagccgtttcctgcacctgctttccggcaggacgcatgtggtgtacacgggcgtaagcatcgccttcgcgggcaagcgcgccgcgttctgcgagacgacggacgtgaccttttacccgctctcggagcaggagatcgatacgtatgttgcgagcggcgagccgttcggcaaggccggcgcctatggcattcaagggcctgcggtgctctttgtcgagcggatctgcggcgattacaacaatatcttcggcctgcccgcggcgcgcctgatgcgggagatccgcgcgctcatgcaggcggacaaataacaaaatcccccctttcggcgtatactggtatgtcggaagggggatttcgaatgcgacgcttcaagatgggacgccgcccggcgcgcggccggcggattctgctcgtgctgtttgtgcttgccgccgtaacggcggtgttcgccgaagcccggctgcctgccgtcaaagcggagcttcagcaggccgcactcagcgcatggggacaggagcagattgcgaaaaccgtggaggcgcagcttccggagagcacggcctccgagagcggctcgctcgtttcgctcgatacatatgaactcagcacgctgaaaaccgccctgacggccgccctgcaaagcgcgctgaccggaaaggcaacggcttgggtgccggtcggcaaccttacgggcgttgcgcttttcaacggccgcggcttcaaggtgccggtctccttttcggtggacggcgtcgtttccgtcgattttgagagcacgctggtttccgccggcatcaaccgcacgaaatatgcggtgacgatgaccgttgcggcagagctgtacagcacgtccgtgtcgttcccggacgtcgtggcggtcgagagcacgtacccggtttacgaatcagtgctcgagggcgaggtgccgcgctatgcggcggggcttgtctccgctggctgagccgcaaatttttccgcagaattacgttttctgcattggatttccgcgcgctttgtggtacaataaccgaaaacggctgcggccggttttccgcagaaacacagcgaacggagaaaatacatgacacaggaacaggcaaagcagcagctcgccgcgctgcgcgagcagatcgaataccacaacaaaaaatactataccgaggatgcgccggagatcagcgactacgaatacgacatgctgtaccgccggcttgaaaatctggaggcggccttcccggcgctgaaaacggaggattccccgacgaaccgcgtgggcggcgagacgtacaacacgtttgccgccgtcacgcatacggtgccgatggagagcctgcacgactccttttccgaggaggagctgagggatttcgaccggcgtgtgcgcgccgtcgtcgaggatccggtctatgtcgtcgagccgaaattcgacgggctttcggtcgcgctcgagtacatcgacggcgtgtatacgcgcggctccacgcgcggcgacggcgtgacgggcgaggacgtgacacagaatatcggcacgatccgctcggtgccaaagacgctttcggagccgctcccgtttttggaggtgcgcggcgaggtctatatgtcggatgagagctttagcgcgctctgcgagcggcaggagctgcttgaggagaagccgtttaaaaatccgcgcaacgcggccgccggctctttgcggcagaaggacccgaaaatcacggcgcagcgcacgctcgacctctatgttttcaacattcaggtgatcgagggcgaggcggtgcacacgcactttgacgcactcgagcggctgcgtgcgctcggctttacagtttcgccggtctactgccgcacgggcgacatggagacggtgatcgagaagatccgcgagatcggcgatctgcgcggcacatttccgtacccgattgacggcgctgttgtcaaggtggatgactttacacagcgcgaggcgctcggcagcacggcgaagttcccgcgttgggcggaggcgtacaaatacccgcccgaggaaaaggcgacgacgctgctcgacatcgaggttgcggtcgggcgcacgggcgttctgacgccgaccggtgttttcgagccggtgtttctcgcgggtacgacggtcggccgcgcgacgctccacaatcaggattttatcgcggaaaaggatatccgcatcggctcgaaggtcatcatccgcaaggcgggcgagatcattcccgaagtcgtgtccgtggtggaaaacccgccggacaccgtgccgtaccgactgccggaccgctgcccctcctgcggggaggagatcacgcggcttgagggtgaggccgcggcgcgctgtacgaacccgcagtgcccggcgcagctgctgcgcaacctgatccacttcgcttcccgcgatgcgatggacatcgagggcctcggcccggcggcactcgagcagcttgtcggcgcgctctctgtcgcgtcgcccgccgacctgtacgcgctcacggcagagcagctcgaaacgctcgagcgcttcggcaaaaagagcgcggagaacctcatcgaggcgatcgaggaatcgaagcggaacgacctctcgcgcctgctctttgcgctcggcatcccgcacatcggcgcaaaggctgcaaagcagctcgccttgacattccgttcgatggacgcgctgcttgcggcggatgcggaggcgatcgccgcgatcgacggcttcggcggcatcatggccgaggaggtctacagctttttccgcaagcgctcggcgctcgagcttgtggagcgcctgagagcggccgggctgaatatggaatcggggggcgcagcggaaacggcgacagggctgctcggcaggacgtttgtcctcaccggcacgctgccgacgctcacgcgggccgaggccacggcgctgatcgagaagaacggcggcagggtgacgtcctcggtctcgaaaaaaacgtcgtacgtcgtggccggggaggaagccggaagcaagctgacaaaggcgcagacgctgggcatcacggtcctgacggaagcggaactgatcgaaatgacagaataaaggaaggggcgcgcaggggaggcctgcgccgaaacaggtggtcaacatggcagaggaaatcaaaactacggaagaactcgaagaggccgctccggcggtggacaacgacgaggatatcgaggcgtatatccgcgagctgaccggcaaaacgccggcgcagaagaaggccgaggaaaagaaggcgcgcgagcccgaggtggaacacttccgcgtcacgagccagatcggcgaggacgaccacagggcgttcatctattattcgacgctgctgcgctacaaatgggtgctgccggcgttcctgatctcgccgctcgtgttcgcgcttttcttctcgtttgtggacgggcggttttattcgggcaacttcctgctcgcgatggtcgtcttatacgtggcgatcacgctgatcgtcgtgatccgctgccagcgctggctttccaaaatcaaaaagaacaaccccaaaacgctgtacctcacggagacgacgcttgcctttcttacatacagcgttgtcaacatgaaaaacggcaaccacatcaaggtggggtacgagcatatgatcggcgtgagcgagagccgcaagcgctttatcctgtattttgacaacggcaagtcgatggttttccgcaaggaggacatgccgctcgaggtgcaggagaagttccggccgttcatccagtcgaaggtgcacaaggtcaagatgttcaaaaaataattccggccatgccggaagaaagaatggtgatacataatgacgcaggatctgaaagcgctgtacggcgcggaggccgaggcgcagagggcgcgctatgcggcgctgaacacggcgtttgccgaggcgttcggcacggaggccgaagcgctcgagtatttcagcgcgccgggccgcacggaggtcggcggcaaccacaccgaccacaataacggcaaggtgctcgcagcggccgtcaatctcgacgtgatcgccgccgtaaaaaagacggaaaacggcgtgatccgcctcaaatccgcgggctacccgatggatacggtcgatacggccgagctctctgtgcaggagagcgagaaggagcgttccgcggcgctgatccgcggcgtgtgcgcgcgtctgaaagcgctcggctacaaggtcggcgggttcgacgccgtgaccgcatcgcgcgtgctcaagggctccggcctttcgagctccgcggcgtttgaagtgctcgtcgtcacgattctgtcccacctctacaatggcggcgcgatcgcccccgtcgaggcggcgcagatctcgaaatacgccgagaacgtctacttcggcaagccttccggcctgctcgaccagatggcggcgagtgtcggcggcttcacgacgatggactttgcggacccggccgcgccgaagatcgagaagatcgatttcgatctcgagaaactcggctacgcgctctgtgtcatcgatacgggcggcaaccatgccgacctcaccggcgaatacgcggcggtgccggcggagatgaaggccgttgcggcggagatgggggcatccgttctgcgcgaggtcgatgaggcggctttctatgcggcgatcccgtcgcttcggaaaacggtgggagatcgcgccgtcctgcgcgcgatccatttcttcagcgacaaccgcatcgtggacgaggaggtcggtgcgctgaaatccggcgacttcgaggaatttaagcgccttgttatcgcctcgggccgttcctcggcggtgaatctgcaaaatgtttttgctgtcgtcaacccgcaggagcaggggctttcgctcgcgctcgcgctgatcgagcggcagctcagcgggcgcggcgcgtggcgtgtgcacggcggcggttttgccggcacggtgcaggcgtacgtcccgctcgatatgctcgagggcttccgcgcggaaatggaggctgtgttcggcgcaggcgcctgctatgtgctctccatacgcggcgtaggcggcacgaaggtcacgctctaaaatccaattgcataggaacgtatacataaaagaggaaaagcagcctgaaacaagctgcttttcctctttttacacaattttcactcagcgcgtttcccgcataatcagcaggttcatggtgtcgccgctgtacgcgatgctcaggtaaacgccgtccttttccagcagcatgccggatgacgccgattccgccgctgcggcgacctccgcgtacccctgcgcctgcaatgcatcgatgtattcttcaaaggccgcatcggagctgaagtcccatacgatctcgtactttccgtcgtccgaaaagtcccgcacgtaatcgatagcgccgtcctgcggttcgggaatccgggcggtcaggtcgttttcaggccacgcgtcgatgtactgcggctccgcggacggaagtgccgcgaaattgcccgcagccgtttctgtaccgatgcagccgcagagaaacagcgtgagggcggcggcaagtgcgacggccgccaaaatgtgccgcctgtcgtctcgtctcatcgttctttctccttccggcgttcccggatgtgccggacggccagaattacggcggcaacgcccgcagcagtgccgagcaggagaagcagcgcggggacgaccgggagcccctcgctgtatacctgaatcgaggtcatcgcgtcggcctgaccgatcgcgttttctgggggacgcatcatgcgggaggccgcatatacggtgagcaggacggcggaaagcagggcaagcacccagatcagcgccgttttcccgtgtcttttccgcttgatgccgcgctggttttcgatgtccccggcaaattccgcgggggagccgagccgttcgatcacgtcctgctcggtttcgccgtgctcgagcgcggaatcgaaggcctcctgcaaatcgcgcaggatctcgtccttcttcgccctcggcacggtcagcgcttttttcacctgtcggatatactgttctttcgcgttcattttttcgcctccttcggcaagcattgccggatgaatgtatcgacgcatacggtgtattctttccagaaagcgatcagctcggaaagggtttcgcgccctttgtccgtcagcgcatagtacttgcgggagctgccgtttgcggccgccggtacgatgcggctgcggatcaggccggcgtcctgcagccggtagagaatagggtagatcgtcccttccttggcgtaaccccatacggcggccccgtgcgcgttcagcgcggtgatgatctcatagccgtacgtttcgccccgggcgatcaggcacagaaggaccatttccagcgagcccttcttgaactgctgcatgtacttgccgtccatcggcatcctcccccctatactatgtaatactaattagttgcgctaagtatatcggaatccagttcgcctgtcaagcccttctgtggaaaatccgccacagggcatgcatcgcggaaaccgagcaaaaagggaacgccttttgcatctgcatgcagtttcaaagcggccgcagcgctcaaaacggacggataggcggataaatacaaaatcttgtccaaattttaaatttcaggcaaagaccttgcggtttttttgaatttgtgctatcctataatatatgtctgattttgtataaggagaagtatcgtttgaaagataaagaagttatgcccgcggcggagctgcaaaagcagaagctgtatgccgcggatgtcgccgcgatcatgcaggtgcgcgcgatgggtacggaaccgaaggcttttgtgcgcacctacggctgtcagcagaacgtggcggacggcgaaaaaatcaagggtatgctcgctgaaatgggttttgcctttaccgacgacgaaaacgaggcggatttcatcctcttcaatacctgtgcgatccgcgagcacgctgaggaccgtgtctacggcaacatcggcgcgctgaaaaacgtcaagcgccgcaatccctcggtgctcatcgccgtctgcggctgcatgatggagcaggcgcacgtggcggagcgcatccgcacgacgttcccgttcgtcaacatcgtgttcggcacgcatgtgatccaccgcctgccggagatgatctttacggcggtgacggattcaaagcgcgtgttcctgcgcggcgaggaatcgaaggagatcgtcgaagggctgcccgtccggcgcgacggcacagcccgcgcgtgggtcacggtcatgtacggctgcgacaatttctgctcctactgcgtcgtgccctatgtgcgcggcagggagaagagccgccatcccgacgcgatcgtcgaggagtgccgcggtctgatcgagcagggatacaaggagatcacgctgctcgggcagaacgtcaattcctttggcaaggggctcgaggaaaagatcaatttctcggagctgctgcgccggatcgacgcgatcgacggcgattaccgcctgcgctttatgacctcgcacccgaaggacgcgacgcgggagcttttcgacacgatcgcggagagccggcacatctgccatcacatccacctgccgtttcaatccggcaacagccgcgttttaaaggcaatgaaccgccgctacgaccgcgagaagtacctcggcctgatcgcttacgcaaaggagaagatgcccgacctgtccttgacctcggacattatcgtcggcttcccgggcgagacctatgcggaatttcaggatacgctgagtctcatccgcgaagtggagttcacctcgcttttcacgttcatcttctcctcgagacccggtacgaaggccgcgtcgatggaggatccggtgccgtataaggagaaaacaaagtggttcgcagagctccttgcggcgcaggaggagatcgccgcccggcgctgcgcggcgatggtcggcggtacggagcgcgtgcttgtcgaggagcgcaatgagaagaacggcctgctctgcgggcgtaccgaaagcagcatcatcgtggaatttcccggtgacgacgcgctgatcggcacgttccaaagcgtgcggatcaccgaggcgcgcaactggattctgcgcggcgagcggatcggctgacgcgggggagattccccgcagaaacaaaaggaggcgtttaggcgatggagggcctgatttccatgggtacgatcctcaggatctttgcggccgccgccatcgtgtgcgccgctgtgacgatttacatcacgacgagaaaaaaataattttaaatatcaaaaggagttactaaaatggacatcatcgagcttgcaagagaccttggaaagaagattcaggaggacgaccgcttcatcgcgatgcacgtggcgagccagcagtgcgacgcggacgaggctttgcagaacatgatcggcgaattcaacttaaagcgcatggcgatcaacaacgaggcgcagaaggaggaccgcagcgaggagacgctccgcacgctgaacgacgagctgcgcgcggtctatgccgaaatcatgcagaacccgaatatggcggcgtacaacaacgcgaagaatgagctcgacgcgctcgtgcagcgcgtgacgacggtcatcacgatgagcgccgacggcgaggatcccgatacctgtgactgcgattcctgtggctgcggcggcaactgttcctcctgcggcggtggctgccactgagtgaacccgcagtaaatcaatagatatggagagctggcatggctgattattccccgatgatgaagcagtatttcgaggtgaaggagaagtatccgaacacgatccttttcttccgcctcggagacttttacgaaatgtttttcaacgatgcaaagaccgtgtcgcgcgagctggagctgacgctcaccgggcgcgactgcggtcaggcggagcgcgcgccgatgtgcggcgtgccgttccacagcgcagagacgtatatcgcgcgccttgtggcgaagggctacaaggtcgcgatctgcgagcagatggaggaccccgcgcttgcaaagggcatcgtgaagcgcagcgtgatccgcgtgattacgccgggcacggtcatggaaagcagcatgctcgacgaggcgaagaacaactacatcgcctcgatctattatttcggcgagaatatcggcatttgctttgcggacatttcgaccggcgagctcgatgcgacgacgctgacggcgaaggagcccgaggtgctctcccagctcgtcatcaacgagctttcgcgcttttcgccgcgcgagatcctcatcaatccggaattcacggatttcggggacgccgcaaagttcatctccgaaaagctctccgccgcgctcgagtgcatggatttcgaggtgtatgcgcccgacgcgtgcgctgaggccgttcggcggcagtttcacgcggaggtgctcgagcgctccgccgtactcgaacagcgcgagatcgtcatggcgctcggcgcgctgctcgactacctcaagcgcacgcagatcaccggcctcgagcgcatggaggagatcaacgtctacaccgaggcgaaggccatgcggctcgacctcaacacgcgccggaatttagagcttacggagacgatgcgcagcaaggagcgccgcggctcgcttttgtgggtactcgacaaaacgaaaaccgcgatgggcaagcggctgatccgcgcatggctcgagcagccgcttctgagccccgcgaagatcacgctgcgccagaacgccgtggcggagttctgcgacaaccgcccgctgctcgattcgatcacagagagtctgaccggcatcttcgacctcgagcgcattatgacgcgtgttgtctacggttccgtaaacggcaaggatctgcgcgctctttggtcggcactgacgcgcctgccgcagctcaaggcgcttgcggccgggtgcgaggcgacgcagctcaagacgatcgagaagcagatcgacgcgctcgaggatatttgcgcgctgatcgacaaggcgatcgtcgaagagccgccgcacacaatccgcgagggcggcatcatccgcgcgggctatgacgcggcactcgacgctgtgaaaaacgacatgacgaacggcaagcagcttatcgccgagctggaggcgcgggaacgcgctgcaacaggcatcccgaagctgcgcgtcggcttcaaccgcgttttcggctattacctcgaggtctcgaacgcctttaaggacaagaccccggagcactacatacgcaagcagacgctcgcaaacggcgagcgctacatcacgcaggagcttaaggagctcgaaaaccgcatcctcggcgcgcacgacaagtcgatcgcgatggaatcgaagctgtttgaggacgtgcgccgcacggtcgccgaccagctcacgcgcgttcaggagaccgcgaaggcggtcgcgcagctcgacgtgctcgcgtcgttcgcggcggtttcggtcaagaacgattacacgcgcccgagcgtcacgatgaacgggcgcatctacctgaaggacagccggcacccggtggtcgaggcgctgctcggcggctcaacgccgttcgtgccgaacgacctcgatatggacccgaaccagaaccgcgtctcgattatcaccggccccaacatggcgggcaaatcgacgtacatgcggcaggtggccgtgatcgtcatcatggcgcaggtcggctgctttgtgccggcggcctcggccgagatcggcatcgtcgacggcatctacacgcgcgttggcgcgtccgatgatctcgcggcggggcagtccacctttatggtcgagatggccgaggtggcggacatcctcaaaaacgcgacgaaggacagccttctgattctcgacgagatcggccgcggcacctcgacgtttgacggcatgagcatcgcccgtgccgtgatcgagtacgtgcacgacaaaaagctgtgcggcgcaaaaacgctgttcgcgacgcactaccacgagctgacggagctcgaggatctgctgcccggcgtgcagaatttcagcatcgccgtgaagaagcgcggcgacgagatcacgttcctgcgccggatcgtgcgcggcggcgcggacgacagcttcggcatcgaggtcgcaaagctcgccggcgtgccggacaaggtggtgcggcgcgcaaagcaggtgctgcagagcctcgagagcggcgaggccgtcacggtgccgaagaatgcggcgcccgcaaagcgcgaggagccggttcagctcacgatgctgacgaaggacagcgaggtcatcagccggctgaaatcggtcgacgtcaatacgctgacgccgattgaatcgatgaatctgctctttgagctcgcaaatatgctcaaggattaacgaaaaacaagggaagggcaggtgcagaaaatgccgaaaatcaatgtgctcgacaagcatgtcgccgagctgatcgccgcgggcgaggttgtcgagcggccgtcctcggtcatcaaggagcttgtggaaaattcgatcgacgccggcgcttcgatcgtcaccgtggagatccgccgcggcggcgtcacatatatgcgcgtcacggacaacggctgcggcatcgcccgcgaggacgtggcgacggcgttcctgcgccatgcaacgagcaaggtgcgcgccgaggacgatctgaacgcgatcctcacactcggcttccgcggcgaggcgctggcctcgatctccgcggtcgcgcacgtcgatcttatcaccaaaacgccggacggcgcggtcggcacgcattatgccgcgagcggcggcagtgcggtttcggttgaggatgccgggtgtccgaacggcacgacgatcaccgtgcgggacattttctacaatgtgccggcccgcatgaaatttctcaagaaggatacggcggagggcaacgccgttgccggccttttggataagatcgcgctttcgcaccccgaaatctccttccggctgatccgcgagggcaaggagacgctgcacaccccgggcgacggcaggctctcttccgcgatctacgcggtattcggcaaggaattttcctcgaacctgcttccggtcgattacacattcggcggcgtgcgcgtgcacggctatatctcctcgccgatcggcagccggccgaaccgcagcatgcagaactttttcatcaacgggcgctttgttcgcagccgcacggcggccgttgcgctcgaggaggcgtataaaggcgcgatcatggtcgggaaattcccggcctgcgtcctgcatctggagctgccctccgaggctgtagacgtcaacgtgcacccggcgaagctcgaagtgcgctttatcaatgagcgcccggtgttcgacgcggtctacggcggcgtgaaatcggcggtttccgcgagccgcgatatgaaatcgattgaactcacgcggcaaaagccgcttataaacccgtataagcccgatcacgagaaagcgccggtacagacgtatatcgcacagccgccggtgcagcgcccgcggcccgcgcctgtcacaccggctgtttccgtgccggaggtgaccgcagagacacggcgcggcccggagcctcagccggagccgctcgctttttcggacagcgcgcagggtgagcggtcgtctcgcccggtgatctgcgacgcgatcgaccgcgtgctcgaccatgagccggagccggaaaagccggcgcccgcgcggtatccggcacctgtacaggctccggacatcgaggtggagccggaggatgagccggtgacgctgccgcaggcgccgcataccgccgagtccgaggcgccgccggttccgacgcccgcgcaggcaccgccggtgcacaaggtgatcggcgaggcgtttgacacgtacatcattttgcagtacgacagcgaaacgctgatgtttatcgacaagcacgccgcgcacgagcggctgctctacgaacagttaaaaagccggcggcgcgaggctgccgcgcagacgctgcttttgccggtgacggtcacgctcgacaaggcggaatacaccgccgtgctttcaaacctgcaaatatttgccgacgcgggcttcgacgtcgaggatttcggcagcggcacggtgctcgtgcgtacggcgccgctcaatctggacggcgcggacatcgagggctccgtactcgaaatggccggatacctcgagcagaaccgcagcgacgtgacgacggagcacatggactggctctatcacaacatcgcctgccgtgcggcgattaaaggcggcagcgcatcgcgccgcgaggagctgatcgcgctcgccgagcggctggagcagaaccccgaggtgcgctactgcccgcacggccggccgatctacgtcatgctgaaaaagaaaatgctcgaaaaggaattcgggcggctcggctgatcgaaagggaggaacggttttggaaaataaaatcaagctccttgccgtatgcggcccgacggcctcgggcaaaacggcgctttccatcgcgctcgcgaaggcgcttggcggcgagatcgtgtcgtgcgattccatgcagatttaccgcggcatggagatcggcacggcgaagcccacgcccgcggagatggacggcgtcccgcaccatctgctcggttttctcgagccctcggcggccttcagcgccgccgattatacgcagctcgccgccgaggcggttcgcgggatcgtatcgcgcgggcatataccgctgctcgtcggcggcaccgggctgtatgcccgcgcgctgctgcgcggcatgtcctttcccgaggagagctgcgacgaggcggtgcgtgccgccttgtacgacgcgtatgctgcggacggcatcgagccgctttacgagcgcctgcggacgctcgaccccgaagctgcggcgcagattcacccgaacaacacgaagcgcgtgattcgcgcgctcgaatactgcaccacgacaggcggcctgttttccgagcaggcaaaggcctcccaaacggcggcttcgccctacgattacaggatgctctgcctctcctgccgcgaccgcgaggcactgtacgcgcgcatcaaccgccgcgtcgatcagatgctcgaggacgggcttctcgaggaggcgcgccggtatttcgagcagtgcggcacaagcgccggcacctcggcgcaggccatcggctacaaggagctgcgcccgtattttgaggggcgcagcacgcttgtagaggcggtggaaaacatcaaaaaggagacgcgccgttatgcgaaacggcagctcacatggtttaggcgcgaggaaaatacggcgtggctttatacggatgattacccggatgcggccgcgctgtatgaggcggccttggagatcgcggcggagcattttgccggcggtccctgtgaaaggaagagtgcgcgatgaataaccctttaattcgaaaaatcggcgcgaccgcagttgcggttttgcttttgatatatgtcggctatcaggtgtatctcagccagtataccggcctcaaaacggaggcggctacgtattcgaccgtttcggaatcgatcgatacgacaggctttatcatacgcgacgaggaggttatcagctcgagctacagcggtgtgctcaactacacggtggacgacggcgaaaaggtcgccgagggcggcgcgatcgcggaaatctacccgacggaggaggacgccgccgtgcagaaccgcatcgcgcgcatcgatgacgagctgaaccgcctttcggcgctcgaaacgccgagcgattccactgcgtcgaatcccaagctgatcggaagtcagatcagcaaaaaaattacctcgattttgggcgcgctgaaatccggctcgatgtccgacgtgacggacgagcggaacgatttgcagcttctgctcagccagcgtcaagtggtgaccggaaaggaatcgagcggcgactatgccgcgcacgtcaacgagctgcacgaggagcgcatcgcgctcacgcagtcggcctccgcgagcatcggcacggtttcgtcgcctgctgcggggtacttcatccgctcggtggacggctatgaaaacgccgtttcgctcgacggcgtcacctcgctttccgtgagcgatgtgcgcgcgctggaggaagaggagcctgccggcacggatacggagagcatcggcaaggtcgcaaaggatttcaactggtatatcgcctgcattttgacggagaacgatctcgtgcggctcgaccgcacgacgaaggtcaccgtggaaatgcctttcgcaacggtggagcagatcccggcggaggtcgtgaagatcaaccgggacagcgaaacgggcgaggccgccgtgatcctcaaatgcacgtatatgaacagcgacctcgcctcggcgcgcatggaaacgctgcgcatcaatatcagcagctattcgggcgtgcttgtgccggaaagtgccgttcattttgcagacgttgtggcgcatgagacggacgaggacggcaacgaggtcgatgtgacctacgaaaacatccggggcgtttatgtgaaatccggcagccggctccgcttcgtgcagattttcagcgatgcaacgatcaacggctacgcgatctgcaaggtcagcctttcgacggaggagcgcgaacagcttgtgacgggcgacaccattcagctttacgacgaggtcgtcgtggaagggacggatctatatgacggaaaaatgctctgatccacgccttgcctgcgtggaggaaaactataaggccatcgcagagcgcgtcgcgcaggccgcggtgcgttccggccggcggcccgaggacgtgacgctgctggcggcgactaaaacggtgccgccggcgtacatcaaccacgcgattgcctgcggcctgcgctgcatcggcgaaaaccgcgtgcaggagcttctcgagaaatacgatcagatcgattggtcaaagggcgtaacaggccatatgatcggccgcctgcaaacgaataaggtgaaatacattgtcgataaggtcgcctgtatccaatcggtcgattccataaagcttgccggggaaatttcaaggctttccgtaaagacggggcgcaggatgccggtgctcgtggaggtcaatatcggcggagaggagaataagggcggtgttccgccggagaaaatttatgaatttttggaagagatttcctgttttcccggtattcaggtcgaggggctgatggcaattcccccgatttgtgccgataaaaccgcactttgcaattatttttctggaatgcagcaatattttattgacattggggcgaaaagaatagataatgtaagtatgaattgcctgtcgatgggcatgtcatccgattatgaggaggcgattctttgcggcgccacaatggtccgcgtcggctccgctttatttggtcagagaatttatccttaaactttggaggtaatgatagaatggcaggtttggttgagaagcttcagaagatgtggaatccgccggacgacgagtacgatgattactacgacgaggagcccgcaagcgcgggcgcgtcctacgacgaccgcgaggaatcggccgcgccgcgccgcacagcattctcctcgggttcgtcgagccgcgtcgtgaacatcaactcgagggcgcatgtgcaggttgtcgttttccgcccgatttccttcggcgaggagacgcgcgccattgccgatgagctgaataacaagcatacggtgattctgaacctcgagaaaacgcagaaggacgaatcgagacgcattctcgatttcctcagcggcgtcgcttacgcaaacgacggaaagatcaagcgcgtttccacgagcacgttcatcatcacgccgtacaatgtggatctgagcggcgacgaggtgatggacgagctggagcagaacggcgtttacttctgatgaacggcgacgagcgaaagctgctggaggcaaggcttgcggactgcgtgcggcttggggaaaaacgccccgcctttctgggctttctggaattatcggagcgcgcggaggcggaagcgtatctgcgccgtgcccgcgcggaaaactggtgctttttcggcggctgggaggatgcggagcgcgtgatgctcggcgtttttcccgattatctggaggcagacgcgtcgcttttcccgcttctcgggctgaccatccgctttcggaaacaggatacactttcacaccgggactttctcggctccttcatggcacagggcgttgtccgcgcttcggtcggcgacatcctcgtggaggcgggccgtgcagtcctgtttgtgaaaacagaacttgcgccgcattttttgtcgcagattgaaaagatcggccgcgtcggcgtgcaggtcagcgagggatttgaaacgccgcttccggcagcgcacaaattccagccggtcggcggcgtggtcgcttcagagcggctggactgtctcgtcgcgctgcttgcaggcgccggccgcgaaaaggccgcgcagatgatcgccggcggctttgtgtcggtcaatcacagggaaaccctttccgcgtcggcgcgcgtcgcttccggcgacgtcatttcgatccgccgctgcggaaggtttatcgtagatgcgcttggcccgaaaaccaaaaagggccggctgtctatacagtgcaggaaatacatataggaggcttaccatgttatcgatcaaggacattcaagaagtcagcttcagaaaatcgaatttttccggatacaattcggatgacgtagatcagtttatcgacgaagtgctggaaacggtcaccgcgcttgcaaaggaaaatgcagaggcaaagacgcgcacgacggacaatggctcgcgcgtcagcgagcttgcggctaagaatgcggagctgcaggaaaagctttctattctggcggagaaaatcgaggcgtaccgcgccgacgaggacggaatcaaggatgcgatcctcagtgcccagcgcctcggcaacgcttcgctgcgcgaggccaaggccaaggcggaggcgatcgtatccgacgcgaacgcgcgggcggagaagatcgtgaacgacgcgcgcgcaaagtcgcagaacctcgttgaatcctataaatcgcagatcgcggacaaggaaaaggagctcgaaatgatgaagcgcgaggtcacggccttccgcgcctcgctctacgagatctaccgctcgcatatcgccgtgattgagaagatcccggaatatgattttgacgatgaggcggaggaaatcgtttccgcgccggccgagccgcgcatcagctatatcccgcagcctgtcgaggagccggaggaagaggaggagatccccgttccggccgccgcacaggaggaggaagagcccgctccggcagccgagcctgtacccgcaccggttgctgcgcctgcgccgcagacctacgacaaggacgattacatcaaagagcagttcaacggcatcggccttgacctgaatgcctacgccgacattccggagacgctgcagaaggaaaaggaatcgcttttcagcacgcttgagttcggcatagaggatacgaccaagaaaaaaggaaagtttaagagaagataaatcaccagaaaggcacggtttcagctaccatggactataaaagcacattgaatcttccgaaaaccgactttgcgatgcaggccgggcttccgaaaagggagcctgaaatgctcgagaagtggtatgcggatcacgtttacgagacggtacttgagaaaaacgagggcaagccgctgttcgttctgcacgacggccccccgtatgcaaacggcgacgtgcacctcggcaccgcattgaacaagacgctcaaggatttcattgtccgctacaagaacatgagcggctttaaggcgccgtacgttcccggttgggacacgcacggcctgccgacggagctcaaggcgagaaagaaagccggcgtttcaaacgcatcggcgatctcggacgtggagctgcgccagctctgccgcgagtttgcactcggctacctcgacgagcagcgcaattccttcaagcgtctcggcggcatcggcgaatgggataacccctacatcacgctgctcaaggattttgaggcgaaacagatcgaaatcttctccgagatggcgatgaagggctttatctacaagggcctgaagccggtctactggtgtccggagtgtgagacggcgctcgccgaagcggaaatcgaatatgcggaggacccgtgccactccatttacgtcaaattccgcgtgacggacgacaaggggctgctcacgaagctcggcgccaagctcgaaaatacgtatttcgtgatctggacgacgacgacatggacactgccggcaaacgtcgcgatctgtgtcggccctgaatttgaatatgcgctcgtgaaagccggcggcgaatgctacgtcatggcgtcggcccttgtggaatccgccatgcaggccgcaggcaaggccgattatgaggtgctcggcacgctcaagggcagcgagctcgaatatatgaagacggcgcacccgttcctcgaccgcacgtcgctcgtcatcgtcggcgatcacgtcacgcttgaaagcggcacaggctgcgtccacacggcgcctggccacggcgtggaggactacgacgtctgccacaaccattacccggagatcccggtcgtcgtgcctgtggacagccacggcagaatgaccgcggaggccggcgattttgtcgcggggctgacgacggacgaggcaaacaaggtgattgccgcgcgtctcgaggagacgggcaatctgttcgccctgcagaagatcatccaccagtacccgcactgctggcgctgcaagacgccggtgctgttccgcgcgacggagcagtggttctgctctgtcgatgcgatcaaggagcaggcgctcgaggccatcaagggcgtcaagtggatcccgggctggggcgaggaccgtatttcctcgatggtgcgcgaccgcaacgactggtgcatctcgcgccagcgccgctggggcgttccgatcccgatcttctactgcaaggactgcggcgagcctctgatctcgaaggcggccatgcaggccgtcgccgatctcttccgcgcggagggctccgacgcttggtatgcaaaggacgcggcggaaatcctgcccgcgggctttaagtgcgaaaagtgcggctgcaccgcgtttacgaaggagcgcgacatcatggacgtctggtttgattccggcgtcacgcacgccgccgtctgcgacgagcgcgattcgctccattggccggccgacctctatctcgagggcgccgaccagtaccgcggctggttccaatcctcgctcctgacgtcgatcgcatggcgcggcaaggcgccgtataaggcggttgccacacacggctgggtcgtcgacggacagggcagagcgatgcacaagtcgctcggcaacggcattctgccgaaggagatcgtcgacaaatacggcgcggatattctgcgcctgtgggtcgcctcctccgactaccacgcggatatccgtatttcaccggaaatcctcaaacagctttccgacgcttaccgcaagatccgcaacacggcgcggtacatcctcggcaatctctccgattttgatccggacacaagcagcgttccggtttccgatatgctttcgatcgataaatgggcgctcaaccggctggacagcctgatcttcaaggtgcgcgagggctacgaggcgctcgagttccatcaggcgtaccacgcgatccataacttctgcgtcgtcgatatgtcgaacttctacctcgacgtgatcaaggaccgcctgtatactgataaaaaagactccacggcgcgccgtgccgcgcagacggcgatgtatatcatccttgatgcgatgacgcgcctgatcgcgccgatccttgcgttcacctccgacgaaatctggcagagcatgccgcacggcagtgactgcgacgcgcgccatgtcgtttacaaccagatgccggagctcgtcagcgtacgcaccggcgaggcggtttccgaggaattcgtcgcccgctgggataagatccatgagatccgcgacgtcgtcaagaaggcactcgaaaacgcccgcgcagaaaagcagatcggcgcttcgctcgacgcgaaggtcacgctctactgcaccggcgagctgtacggcttcttaaagtcggtcgagccggagctttccacggtgttcatcgtctccgcgacggagattgttgacggcgaaggcggcacgcatacggatgaggcgctggggctttcggtgctcgtcgaaaaggcatcgggtgaaaagtgcatgcgttgctggtgctactccgatacggtcggcacagatccggcgcatcccgacctgtgcgagcgctgtgcgaaggtgctttcataaaaaataacgcttccgaggtgcaaaccggctttgctcggcttgcgcctttcggattgtaaggagaatttctttgcctttactcgttttgatcctgatcgccgcgctcgctgcggtcgaccagttcattaagatgaccgtaatcacgaatttgaagccggtcggaacgctcacggcggttccgggcctgctcgagttcacatatctcgaaaataccggcgcagccttcggcttttttccgggcttttcatgggtcatcatgatcctgacgctgattctttccattcttgtgatcgttttcgtgtttcgctacaagcaccactcgttcctttcctacgcgtggtgcacgctggtggttgcgggcggcatcggcaatctgatcgaccgctttgcgtttggctatgtggtcgattatatccacgtgctgttcttcccgtatatctttaattttgcggactgctgcgtcgtggtcggcgccattctgttcgccgtctggtatctctttgtcaaggagaagaaggaaaagcgcgacagcgatgggaaagaagagcaagatggaacagaagcatgagatcgtcataacagagcccggtatccgcgcggataaagccgtttccgccgcgatgccaacgctttcgcgttccgccgtgcaggggctcatccagagcgggcacgtgcgctgcaacggcgtacccgtgcagaaaagcgcgaagctgccggtgcaggctgtgcttacagtagaaatcccgccggcaaggccgctggaggtcgccgcacaggccatcccgctcgacatcgtctatgaggacggcgatctgctcgtcgtcaacaagccgaagggcatggtggtgcatcccgccgcgggcaatgaggacggcacgctcgtcaacgcgctgctgtaccactgcggcgattcgctctccggcatcaacggtgtgatccgcccgggcatcgtccaccgcatcgacaaggatacgagcggccttttgatcgtcgcgaaaaacgacgcggcgcaccgcagtctcgccgagcagatcaaggcgcacagctttacacgcgaataccaggcggtcgtctacgggcgcatccgggaggacggcaccgtgaacgcgccgatcgcccgccacccgcaggagcgaaagcgtatggcggtgattcagtccccttcggcgcgtgaggctgtcacgcattactttgtggttcggcatttcagcggcttcacacagcttcggctgcggctcgagacggggcggacgcaccagatccgcgtgcacatggcctatatcgggcatccggtcgccggcgacccggtttacgggccgaaaaaggtgatcgcgccgctcggcggccagtgcctgcacgctggcctgatcggctttgttcacccgcgcaccggcgaatacatggagtttgaagcgccgctgccgccgtatttcacggatttcatcaaaacgcttcggccggaggaggtctgacatgcagacgagtccgcagaagattttgctgctgttcgtactctttatcgtgagctgcgggcttgtgattctctgcgtggccggggcggaaaggccgatcgagccgtacgcggtgactgcgccgccggtatcggaagattccgcggctgcggcccccgcagagggtgtacagcgtatcaacatcaatacggcatcgctcgaggagctggatacgctgccgggaatcggagagacgatagccgcgcgcatcattgcctaccgcgaggagaacggcccgttttacgacatcggcgctctgcgcgaagtcaaggggatcggcgacaaaacactcgaaaagctcgcgccgtacatctgcgtttgagctgtgatgaaacgacctgcggcggatttgcaagcgtgcacgctgaatttcaagacggtgctggcgcgtgcccgcacatgccgcgcatggctgtgcggctttcctgcctaccggggtttttgctgaaagcatggaccaatttccccgccggggtacagcggcgcttgcggtgcaggtgccgaaaagtgatttatataagcggctttgttttctctgaatgagagacgattcggcaagtaaaaaaggtacggatgatttacattactgtgaatcatccgtacctttttttgcgttgtcggcgcagaaaagccgggcgataagaggcgggggcgcaaacggcatatccgcttctcctgctagagataaggctccgtaccggaaatgccggcgcgtgccaaatacggggatggactgggcatacaaaagcggtgcagagaagattttgcacgcggcgcaggggagcggccaccggctgcagaatctccccatatggcggcaaaaagaccggatgaattgcgcgacggcggaggaattcaggcggattgtttgcttgatgcgaaagaacatcctgcggggaattacgtacggctttttgctgaaatgtacgggaaatatatctcagaataaaggtttgtatcatctttcctgtctaatgtacaatgatcgtattcttttatgggaggtctaaaaatgaaccaacgcacgattgaagcaaaacagattgcagattttggcaggatgctccgcgaagaggagcgcagcggcggaacgattgaaaattatctgcgccatgtgcgcatgttttcggcttggcttgagaaccgatgtgtctccaaagaacttgtggcggcgtggaaggaacggctgctggaaaagggctacagcccggggaccgtgaacagcatggtggtatccctgaatcgatttcttgcctttcggggctgggcggactgccgggtcaagacgctgcgcatccagcgccagcttttccgggaggacaggaaggagctgacgcgcacggaatacgaccgcctgatcgcggctgcacagaaaaaggggaaagtacggctggcgctgctgatggaaacagtctgcgcgaccggcattcgcgtgagcgaggtgcgttacatcaccgtggaggccctgcggcgcggctgggcggaaatatcgctgaaagggaagatccgaaccatcctgatccccgataagctcagaagaaagctcatgaaatttgcgcataaaagaaaaaaagattccggcgagatatttctcaccagaaacaacaaaagcctatcgagaaaacagatttgggccgagatgaaagccatctgcatgcaggcgggggtgacggcctcaaaggtttttccgcacaacctgcgccatctttttgctagaaccttttacaaagcgtaccgggacattgtaaagcttgccgacgtactgggccattccagcctcgagacaacgcggatctatctcgtctccacgggcgcagagcattcccgggcactggagcggctgggccttatcgtataaacacaaagaaggacgatattcacagattgtttccttcataaaaggacgatattcacatatcgtcctcaaaaaaacgcctgaacggaaaaccagtccgcattcacaattgtattttacatctttttattgcattatacaattttttgagataaaaatcaagtaaaaaatttgtctgctgcatgccgattaggccgaacgaggagatttactctgatttcggccttgttttcatgcgcagaatactgtgcagagcataaatccaaaaaaattacgttctatgggcagagaatattccttaccgcgttttatgcagagacaatatgtgaattttgtcctgcgtttaggttgagtggcagccatcccttttgcaagggaaataagggagtagggagaaaactgtggataacaagggaaatgtaatggtggtcgatctcgtgcagctggcgaaagccctgtggcaccgggcgtggataatcatattggcggctgtggtggctgcgggggcggcgttttcttataccagctttttggttacgccgctgtatacggccagcgctatgatgtacgtcaacaacagctcggtttcagtcggcagcacgcaggtggatttaagcgatctgacagcggcgcagagtttggtggaaacctatatggtgatcctgaaaacccgcgggacactgacacaggtgatcgaaaaggcggagctgccctacacttatgaggagctttccgagatgattgaagccaagtcggtgaattcgacggaggttttcgagattgcggtcacaagcgccagcccgctggaggcggagaaaatcgcaaatacaatcgccgagcttctgccggaccggatctccgggatcgtggagggcagctctgtgcgcatcgtggattatgcggtcgtacccgcgcagaaggcttcgccgagtatttcacggaacacacttctgggcggattgctcggcgtggtgctgtgctgcggtgtgattattctgcgggagatcttcgatgagcagatccgcgacgaggattatgtccgggagacgtttgatctgccgcttctcgccgcggtgccggatttgacggccagaggcagggagaatacagcgtatcgcggcagtacatctgaaaaggaggcaaagctatgagaagcaggcggaaaatagcagctgtggccgatcgggaatatgggtcgatgctgggcgggcagctgagctttgcggcatcagaggcgtataagctcctgcgcacaaatctcaattttgcgctgccggatgaacagcagtgccgcatagtcggcgtgaccagctccgtgcgcggagaggggaagagcacgacgaccatgaatctggcctattccattgcggaaaccggaaagcttgttcttgtaatcgaggccgatatgcgcctgcccactttctccaagcggctcgggctgaataatgcgaagggcatttccaatctgctggcgggcctgtgcactggtgcggatgtgttgcagaaatccgggctgcacagaaacctttgggttattccagcgggcgatattccaccgaatccctccgagcttttgggctccgagcagatgcgtatcacgcttgaggtgctgagcaaggatttcgattacatactgctggatctgccgccggtcactgccgtttcggatccgcttgtggtttcgaagctggtcagcggcatggttcttgtagtccggcagaactacagcagccggcgcttcctgactgaggcggtgcggcagctgcgttttgcggacgcgaagctcctcggctttgttatgaccggcgccaatgccccggatgagggacgcaggcgctactacgaaaaatacggttatagctacggatacggcgaggagagccgcaaaaaaagaaacaaggcctcatgatagatttccattcgcacatcctgccggaaatagatgatgggagcggcagcgcggcagaaagcctgcaaatgctggaggtctctgcgcggcagggagttaagctgatcgccgctacaccgcatttctacgccgcggaaagcagcccagagcagtttttgaggcgccgtgccaagtcggcgggcatgctgcaaaaactgctcggtccggcgctgccgcaagtgcttctgggtgcggaggtctgctattttgacggaatcagccgcacggaggcacttgaaggtctaaagctggagggcactgagatcctgctcttggagatgcccttttctctgtggagcagccgcatggtcgaggaggtctcggagctgcagggccgccgcggcacacaggtattgctggcgcacatcgagcgctatctggcctttcagcagccggcggtctgggagagcctgcgcaagcagggcgtgtggatgcagtgcaacgcgtctttcttcctcaactggaaaacaaagcgcaaggcgctgcggatgcttcggaagggggagattcatatgctcggctccgactgccacaatatggcagcgaggcccccgcagcttggagaagccgtgcaggtgattcaaaaaggcttgggagaaagcgcgtggcggaaatttgaccgccaaatgcttgaacgactgaaggcggtgcgttacccatgaaaaaacggatgctggctttcctcattggggtgctcggaatcctctgcgtcatatgcggtgtgatacttcttcagggccaaagggcgccggaaacgggaacgcctgtgctttcatcctcaccgccggaaacagccgcgcccgagtccgccgtctcggtgtcgggggcggaaaagacgccctatgtcagtccgatcgattttgaagcacttcagtcgaagaaccctgatatttatgcgtggcttcgaataccgggcaccgaattcgattttccgctggttcagcggtcgggggacgacaccttttacctgacgcatgacagcgatggaaacgaaagctctgccggcgcgatctttacggaaagcgcctacaacggcacggatatggaggatcccgtcactgtggcctacggccaccagatgcaggccggcacgatgttcggaaggctgcaggcgacgtattccgaaaaggatagtctgaaggaatatggggagatgatcgtctatctgccggataaggagctgcattacacggtgtttgccgcggttccctatgataatcggcacatcctctatcaatacgatttttccagcggccgtcgctataacgcttttctgaacagcattttcgaggtgcgggagatcggcgcgcagatgagctcggaaataacggtgtcgcccgaggataagctcttaatcctgtccacctgcatgcagggcaacccacaaagaaggtatctggttctcgctaagtgcgtgaaagagatagattaaactgaatttgaaaggaagattcataatgaaaaaagttgcagcttttttatcggccatcgtgcttgcggcgctgatgacgatcccggcttctgccgccggatttacccccagtgtggagcagaaggaaagtcccagtatttctacagtcaccgacgcctccggcaattcggtctccgcaatcatccgcgacgcggacggcaacgaggtctacggtgtttcgcccgacaatctgattgtcacgccgctttcggcggcggggcagacgaacgatgcggccggcgcaatgcttgcaagcgcatatgagcagcttcagacggcgaacacgctggcggatatcgttccttctatcggcgacttcctgaccagtctcggcagtgaggccgctgtggaggatctggtggtccgcgatatatttgacgtttccgtaaccggagacgccgcggaatatctggcggaggacggcaacggtattaccctccgctttgatctgaagctgtctccgtcggcgctgctcattgtgctccacaattattccggctcggattgggagatcatcccggaggaccgcgtcgtgcagaatgcagacggcacggtggatgtgacctttgagagcctgtctccgatcgcatttgtcgttgacaatcaggaatccgaggaaaacaacgcgctggatactgcggcgccggtttcgccgcagacgagcgacaatggtcaggcgcctataggcgggatctttgtcgtcgtcctcggctgcgcggcggtctttacggccgtgattctgtggaagaagtatagccgcagctgagatgaagctgcggatggatatgcgcgtcctgaaaggcgcggcggcagcgctggccgttttgctggcgattttagcaggggcgcttctgcttcagtcttgggagaagaatcagggacaggcggctgtccctgaaaattccgtgcctgcgggcgcttcctccagtacagaaacggcgcaggagctgacctattacgacggtgcatggtacgctcggcgcgaagatttggaaaccgtgatgcttctggggctggataaatatgccgatacggccaagaacagttatctcaacaatcagcaggcggatttcctgctcctgctggtgctggacaagggcgcgggaacctgcacgccggttcagctgaaccgcgatacgatgacggaaatccagatgctcggtgtgaacgggaagccctccggctccttcaccggtcagctcgctcttgcccacacctacggcagcgggcaggaggacagctgcgaaaatacggcggaggctgtgtccaagctgctgtacggcgtgccgatcgaccattatatttccatgacgatggacggcgtatcgcttctgaacgatttagtcggcggtgtgaccgtagagattctggacgatttttccgacatcgacgaaacgctggtgcagggtgaaaggatcacgctgcggggtgagcaggcgctgacctacgtccgttcccgcggcgggctggaggacagctctaacctccggcgtatggagcggcagcggcagtatctggcagccttacagggccagcttgccgcgtctgtggaggcggatgagggcttcatgctcagcgccttgctgcaggtcaactcgtatcttgtttcggactgtacggtggagcagctttctgcgctggcggagtttttaagcggggcggagattcaggatgtccgtacgctggagggcgaggcgcgcgagggagaggaattcatggaattttatcccgatgaggcgtttctgcaggcgcttgtgatggatgtattctatgcgtttgagcgcgcgggataagacaaagccaaccggcttacgggctgcatcaaatttttttgtttcttttctgtcgaataccgtcatttttcagggaatgctttcccgaccatagttttgaaggagcttgtgatgggcaatgaataattttagacatgaccttgcggtgcgaagcgttaaactgatcaacccgcttttgatggcggctccctttgcggtgtgctggtttgcctgctatgccgcgcggatgagcgggccgctttacagctggggaaacttggttatgctcctgttgttcctgtttctttacatatccttcggaaaggtctatgacgggtttcttgtctcgatcaaccgcatttcggaaatggtatacagtcaggtgctggcgctgtttttgtcggattttctgatgtatatcgtgatctgcctgcttttcagagcttttgcaaatccgctgccgctgcttgccggtcttgctgtacaggcggccgcctcgttggtctggtgttatctggcgcataagtggtacttcacagtctttcctgccaagcggtctacgatcgtttacgacaagaggccgggccttgaactcttagtgcgggaatatgggctggacaagaaattcgatgtgcgggcgatggtcagcgcgcaggaatgcctcgagcatctgagaatgctcgagagcatggaggtcgtttttctcagcggtatccacagccacgaccggaatatcattctgaaatactgtgtcgagcataatatcgtggtttatgtaattccccggatcggcgatgtgctcatgagcggtgcgcgcaccatgcacctctttcatctgccgatattgcaggccggacgctaccggccgtcgccgtactatcttttctttaagcgtgtctttgatattctggcttccggaatcgctgttgttcttttatccccggtgtttgtcggaactgccgccgcaatcaaggggacggacggcggccctgtcttttacaagcagcgccgcctgacgaaggacgggaaggtttttgacgttctgaagtttcggagcatgcgggtggatgcggaaaaggacggcattgcccggctttctacgggagaaaatgacgaccgaatcacaccggttggaaaagtaatccgcaaggtgcggatcgatgagctgccccagcttttcaatatccttaagggggatatgacgatctgcggtccccggccggagcggccggaaattgccgcacagtatgaagcggagatgccggaattccgcctgcggcttcaagccaaggccggcctgaccggctatgcgcaggtatacggaaaatacaacacaacgccttacgataagctggttatggatctgatgtatatagcgcacccgagcttttcagaggactttcgtatcatgcttgcaactgtgaaaattttgttcatgaaggacagcacggagggtgttgctgaagggcagacgacagcggcgatggtgaaggaagacgagaagagtgcgtaaaataaatggaatatagcatggagtcaggactgtattacgagagcacatgagggaaaagaacatgatatatggggagtttggactgataagcattattatggcggcatataatgctgaaaaaacgatagaacaagcaattagttctgtgctgaatcaaacctaccctaatttcgaattgcttgtggtcaatgattgttctaaggacagaacagccgaaattgttgggaggcttgcagagtgtgatagtcgtgtgagactgatttccaaccctaaaaacagtggagtatcttatacgcgcagacatggtttagaagaagcaaagggtgcatggattgcaattctggatagtgacgatgcatgggctccagagaaactcgaaaagcagattgctcttcaaaagaaggcaaaagcagatttgctctttacgggatctgcgtttatggacacggatagtcagccaattgattggtatcttcgcgctccggtagaagttacttatcgacaattgttgaaacagaatgtgttgtccaattcatccgcgctagtgcgtaaagaactatacgcgaagcattatgcggtcggtgacggaatgcatgaggactttgcaatttggcttggtattctgaaagaaggacgaaaagcctatggtgtggatgaaccattgctcatatatcgaattgcaagatcttcaaagtcgggtaataaaattaaggctgcaaagatgaattggaatacatatcggtatgtcggattgaatctgttgtcggcattttattatgagtgttggtacatggttaaaggtctgctgaaatacaagaacttgaaataggagaatcaaaatgaaagtatgttttatcaatcctccgtttaaggctgagtacggtaagttttctcgtgaatctagaagtccttccattggccacagcggagttctgtattatccgctctggctgatttatgcagcatgtgttgccgaaaagaatggctttgacgtggctttcatcgatgctcctgctaagaggatgaacaaggagcagaccttgaatcgcgtgaaggaagaagcagatgatgcaaaactgttcgtgtttgataccagtacgccgtctatttatagtgatgttgagtttgcaagcacgatcaaaaagatgtatccgaatgtatttacgatgctggttggaacgcatccttctgttacgcccgacgaaactatggctattagcgaactgatagatggattggcacgacatgagtatgattatatcgtacgtgataccgctatcgcgcttcgggacggtgctgacctttcgagtgttcgaggattgacttatcgcaaaaatgatgaggtagttcacaaccccgacgcagagcatattactgatctggatgaaatcccttatgctgcagaatttatcaaacgtagactctgcgtgacggactatgtttttccagcagcggctttcccgtctattcagattttcacgggacgtggttgtccggcacagtgcaacttctgtgtttatcctcagacacttcatggtcatcggtatcgtctgcgcagtccggaaaatgtcatcggcgaaattgaattcattgtcaacaactttccggatgtgaaggaaattgtgtttgaggatgatacctttactattaacaaacagcgtgtctctgaaatctgtaacatgatgattcagaagggaattaataaaaagattcgctggttgtgtaatgctcgtgtgaatctggactatgagacgatgtgcttaatgaagaaggccggttgccatctgattattccgggcattgagagtgtaaaccagcagattctgaagaatatccgtaaaggaacaaccgttgagcaaattgaagattatattgccaatgcccgcaaggctggattggcgattcatgcctgctacatggtaggcaatcaaggcgagacacatgagacgatgaaagagacgctagctgctgccatgcgtttcaaaacagatacggcccagttttttccgctgattccttatccgggaacgggtgctcatgattgggcaaagagcaatggttatattaatggcaagtacgacgagtatattcatgaggacggcacgttgaactgcatcattaatactcctgagctttctgcacaggagttggttgacttctgtgcttatgcaagaaagaagtactatatgcgtccctggtatatcggtcatcgcattgctcgcggtttgtgcgatccggaggatttgaagaggagtttgaaggcattctggcgtctgaaagacagtttgctgaagtaagatactgaggtgaagtatggtaatccatgtcattggaacaataaatgggcaagtcaatgaggggatgagaaatgttgctacccacttgtccaaagagtttgaaaaagagaataccgtactttattctggattaaagcagattgcacagattgtgctgaattccagaagagcagatgtaacaatggtttttgcacgtgccaataaactcgtttatagtttgacttcgattgttacaaagctgtgtaaaaacacatggattattttagtgcagaagccagatgcgagcttcatgcagaaaaatgataagcatctgctgaaatgcagctatctttctattacagaaagggacatgaagaatgtgaaagtcgcgtctggaaaacataaaatgctgttttctgtgggtatcgaatcggataagtttgcgcctgtttctgtagaaagacaaaaacagcttaagcagaagtatggatttgacgttgaaaagccgctcatcattcatgtagggcattgctcgaagggacgcggtttggaggatttcgcaaaaatccatacagcacagcgtatggtggttgccagtgggatgtttgaagatgaaaatgtggtacgcactcttcatgaagcaaaggtaacagtccacaaaggttatctggaaaatgtcgaagaagtgtatcatatggctgatgcatatttgtttcctacaagatcttcagaatttgtaatcagtattccactatctgtaatggaagcactatcttgtggagttcctgtgattggatacaagagttttgaaaatttaaaagaaatcacagactctgagggcggcattacgctgattgacgatgcagaacagattgatgaagttttatctgaagtgattaagagaaaaagcgaccattctttgcttgaaaaaacaagttcttggagtgcagttgctcagaacgtattaaggatggttcgggaggaaaatgcatgaagccggcaatgattagttttatgggcttggatggttctggtaagtcgacgagtgttgattatgcttatgagcaactgaagaagcgcggatacaaggttgaaatcgtacgggcagcatatgttatcatttttttgcgaggggttattaaacttggaaaaaaaatcctgatgaaaaaagacagcgatcctttttccggagattataaggcatacttggatagtttacggaagaatgcatataaaggtggggtgtataagactttttcttttttgacgaccattgaatttaagctgcagattttctttaaaattcgcatgaaaagattctttggtacaaccctgttggtggatcgctacatttatgataacattgtaacctatgcggcgaatctggatctgggcgaagaatacatggaagagacgatgaacggcaagtggaaatatgctccgcgtccagacaagattatttacattaagacgccgatagaggtctgctgttctcggaaagatgatattcctgatcctctttatctggaaatccgcaagccgcagtatgaaaaagttgcagaaatgtacaatgcaaccgtgattgcaggcgatcaggataaacagaaaatgttggatgaagtcatggcagctattgatgaagtactgcccccgctcaaaaagtaattgaataggagtttgaaatggtacggaaactgatcgttcttggcattgacggtatggattgggatgtaattgtccgttataaggatatgcttcctaatgtgtatggcttgatacataagaacaattatcctcatttgcgttcggtatttccggcagatacgaccccggcttggtctactatatatactggcctagatccatctgaacacggtatcataaacttcgtcaatgttggtgcaaagcagaatgcatacaagcctcttacatttgatgacagtgcatttaagggaagaactttttgggatgcactcaataagcaggggctttcgtgcgccgtgattctgcctatgaacatcaaggaaggctgggatattaacggtttgatgattacccgcccctatgaaggcaagattcgcgtctatccgaagaacaaggaaaatatttacaaccctcgatttgatattctgggtacggatggaaaattcacttctgaaaaggatcttccgggtctccgggatgagttctttgctaaggtgaatgaagagatgcgcctgacgcggttagcaatggaaaacgaggatacggatgtgctgttttcatacttttccacaacagacggtattcagcacgatttctggcgtcattgcgatccaaatcatcctgagtatccgggtacaaatgaatacgagaacgtgattcgagatatgtatgtcgccatggacaactatgttggcgaagtgatgcggcaacagcccgatacacctttgctgattatcagcgatcatggtcatggtgcacgtccagtctataccgtgagaatcaatgaactgcttcgacgtggagggtatctggtgcctaagagtggtggggatggttccaagccttctgcaaagaagaaaatcaagaaggtcatcaagaagacagcgctgagtgtagtgaagggcgtcggtctgccgaaatgggcgatgaaactggcgaaaaaattcccggtgtggaagagtttgtttgcatccagtgctgattttgactgggataagacgcaagcctatctgagtgatctttcagctctgaaaaattacagttacggtgggatccgcatcaatgataatgttgctgacaaggacaagcttgcagatgagattattgaatatttgaagacgataaagattgaggaggaagataaaaatctctttgagtggatcgtgcgtaccaacactttctatcatggtcagtatctgaataaatatcctgaaatcatctatcagatggatgaacgctggggaggagaatgggagattggtaagcatgtctttgaaaaaggcggctttatgtatatgatgtctccaggcggtcatcggtggagaacggcggtcattgcgggaaaggatgtatccctagagaagaagcagtatgagatgactgatgtatatcaattgattctcgattctgcgcgatgattagaagggcggtatgcacatgcagaagagagacggatctattgatgcggcaaagggacttgggattctgttcgttattgtcggtcatgttatgtcaccggttatggccgctattgaggcattgatggtcttgtgcgacaaaatttcctgcagcaacatggattttattaaaaagctaggaaagatgtcaatggaaatctatatgccgcatgcgccgattcttgtggtggggagaagtatattgataccgttgctgagtcataagccgggcatctatatcgttgtgtttagcagtattgctttaggcatatcaatatttggcacgctgattatcagaaaaacgaagcacatccgacagattttgtttggggataaagaggaaaacgatgaaaaagatacttgtttgggaaacactggcaaccgtttctggcggtcaaaaaatgacgttgaccgttatggatatgttggtggatgaatatgagttctgctgcttgattcctgcggagggcaggttttcggatgaactgaagaggcgtaatatctcctatattcttatgggggaccagtcacttccgacaggtatcaaaggtaaaagtgtgatacttcgttacggctggatgtcggtgaaaaacgtatttaagtcacttaaagcaatttggcgttataagccagatatgctttactgtcctggtcctgcagcattgccatggagcgctgtatgcggcacgattttgaataaacccgtcatttggcacctgcatcatatctttttagatggcgcaacgaagaaattgctcaacatttgcggaaagtggaagagcgtaaaaaagatcatagctgtttccaattgcgtaggtgaacaaatagtcgattcaaaagcacataaaaaagtagaggtgctttataacccagttgaagttgagaagtatgcaaatggggacgcttctaaagtactgaacgaaattgaagaacggctaggacgaacgattattcgaggggacatggatacttattcatatcggcatactgacaaggaataagtgtcaggacttctttataaagacggttgcagagctaaaaaatgggacaatccgtagtgggtattctgattggagaaacggtgacggatgcggatcagcaatacaagcaggagttgctgaacgcaactcgagagggcgagcttgaaaaagagatttattttgctggctatcgaagaaatatatcggattacttggtcgtcgcagattgtgtggttgtaccttcgatggaaggcttgtcgttggcagcacttgaagcgatgagtgccagatacagggtggttgcgcaagattgcggcggagcagctaaacttttgaaaagtgcgggctgcggcacattatataaaaagaatggaacggcattggatgcagcttttgccgttcgtaaggcgctgcaagaacaggatgttaggagtcttaataaggggtatgaatactgtctgaaacaagacgccggatcgtatattgatcaattgaaaagattattgatgcgggcaaatgaataggagggcaaaatggcggcacagacgatcgtgataggacatgtagcgctgatacagctgtctaaaagacaagactttgtattagatgtcattgctgaacttcgaaagcagggctttgacgccatcggaattttcgcaggagaatgtcgggaaacggaatatatgacagagctcaaacagaaagttaatgtattgggacttgagcattgcgcattgttccttggcaggagaaatgatataccggacttattgaaaatgatagatattttgatgattccgtcatttgaagggtttccgctggcaggactggaagctgctgctgcgggagtatcggtggtagcctgcaatgccgccggcgctcgtgagtttattgaggtaagtggtgcaggacggatgtttgttgaaggagatatttatcaggccgtgacagctgtggtatcagcgtatcaggacagagagaatctgtgcaagaatggagaatgctttgcgcagaaaatggcaatgcagacctatcggcagcatattgcagaacagttccgtatatgtcagtaattgggagtagatgaacatgaatgaatactgcgtagttattactaatccaatgattgccgcaaataaatcagcagaggtcacgttgagtaagtttttgcgtataatttcgccagtataccaagagataactgtagttggcggcaacatatctcttgaaagggatctgcaaggcattcatgtttattccattccgatcaagcgtgcgccgcagaagtttaagagaattctggatattgttgaattgcaggttcaaatggtcaggcaggtcaggaatattgttcagaagggaacgcctgtctatttttgggttggggataagatgattttcccctattgggcagcacgcagaaaaggagcagatatccggtattttatttatggaaatgtattaaaggaaggatttccctctatttttacgaaactatccgctaaattgatcgcatacatggctaatcatgcagatagtgtatgtgtggagagcgcccatgttatgcatgaatgggatggattgattaataacagaaagatgagggaaatccatctatatacatcagttgcgtctgttacaccgccagaacagcgagagaatattgtgggaatgctttgcaggttgacctccggaaagcatgttttggagtgcattcaggcgtttacagaagtgaaaaagcatttccctgagtatagaatggaaataattggttcaggacgacaggaagctgagtgcaaagcgctgattcaacagttgcatgcagatggttatattgatatgttgggctggatcgagcatgatcaaattatagaaaagacgaaaaaatggaaatatctactatccccttcggataccgaaggcatgccaaacagcgtgttggagatgatggggcaggggattcctgtcatcgcgtcgccggtgggcggggtggctgatatcattcatgatgggaaaaatggatgggttttgtatgagacttcttctaatgatatagccgagcagctgaaaaaggttattacgcatgcggagctatataatgacatttcgaagagtgcgcaagaatccattgagaaagaatatgtactggaagcagcacagaaaagggcacgtacaagctgccggatgtaaaagaggacagaaaatatggcgatttggatttggatcggtttggcttgcattttttccaaattggcgttggggaaacgtcagattggcttagaacattatgtttggcttttgtttcccattgatatgtatggaataaatgtggcgggcgtaacaataaagccgtacatgctgttttgtgtgtttttatttcttcgtcaaataaccagagggagaacaataattcgggtaataagagggtggacgctccctagcttggcgatgatgatgctgatttttatattgaatatgtttaacagtgcgtcgcttcattcccttagcgttccatgtatgctaatggttgtctggttttgtatgacgatatataccagcagctggaataaaacggctcataatgatatccaggaagcaataattgcgacgggaataggatatggcttggtatttgtcattggtttcttgttgttgatggtgggtatgaacgtttcgggaataggagcatcaacaagaatgcagccgggtttttttctgcagttttccaatatgtttcatggtacgttaattgaaacaaggcggttgcgcggatttactatagatcctaataccgttctaggtacgttcgtgtttagcggagcagtatcgttgattaagattttgagcggcaagaataagaggcgagaatggctgtgcctaggactctcggcaatatgcgttcttttgagcaattcgaggacaggattaatatgctttgtgcttgcattgataatgtctgtattcggagcctacagaaatggaactatgagaacgaagaatctgataaaaggattggcattgctctctatcttttcggtgtcgattgtgctaattactacggattggattgaaaacttcgtagacttgatagttggcttatattcaaatcgatcgagccttaatgatcagtttgggcggtttacaatttggaaagaagcattcggaattctgatggagaataatcctctatttggcattggaatgggacaaatgcagttttatacttctgcaaaaagagcatgtcacaatacatggttagagtgcctgtgcggaaatgggattgtattgggtagtgtgtttgttctatttatactcatgactttggttagaggaatgaaggatttaatcagaaatgtacagagtgattctaatcagctgcaatggagtttggtgattagcataaccgctgtcattatatcgttgattactgtcgataactcgacttatagttacctttggttcgggctttcaacactgatgatgacaagtagtatttcataaaggaatagcaagagagaaattctgtggagtgaaatcaatgaatagacgaaaagcaagcatacgaaacaccgtgatagcattgacatcggaaattttggttacggttgttggatttatgctgccacgagcgattatggtaaattatggatcagaaacgaatggattgattacttcgcttcaacaatttatacagtattttactttgctggaggcaggattgtcaggtgcggcggtttttgcactgtacaagccattatctgcgggggatacaggaacaattgaaagaatactgtattcggcgaagaaaatgtacgaaaagctgggctgtgtgtttctcgctatgattgcactttcttcggcgatatatccattttttatagcgaaaacagattattcatattttacaatagttcttctttgttgcctgatcgggctaaatggggcaacgcagtttctgtttattggaaaatataaggttctgctgaatgcatctcaaaacagccggtatattgcagtaattaactcattgagcacatgcttgtattcgattaatgtgattattgctgcatatttccaagtgcatattgttatagcagtagggttaggtgttctggcatatattgtgcgcgctatggcttattattttgtggtgcgttgcttgtttccgaaatatgattttcataagtgcggagagtatcggtttgctaatcagaaagaggtattcattcagcaaattctttccttgctgattttgaattccagcacattgattttaacatttaccagaactagcatgcgagaaatcagcgtatttacgacgtacaatatggttcttacagcagttttcttggtaactaatgctgtaaatactggggtatctgcgagtttcggcgatttgatcgcaaggcatgatgagaaaagacttgctcgtgtgtacaaagaatacgagatattgtttcaggcattttggataatcattttcagttgtgttcttgccctatatcagccatttatgaagatttacacaatggggatagaagacgcacaatatgttcggccgatgctatgctttttgtgcagtttattaggagcgttatgggttattcgtaatcaacaatccgtcatgatcgttgctgctggaaaattcaaggaaatacaaaaaggtagtattattgaagcggtattgactattgtattgtcctttgcagggctggctgtttggggattagaaggattggtggcggggcggtgtattgccgctggatatcgtgtagtggatttcattcgatttaattcccaaaacgttgtgaaggttaaaataagatttacagtctgtcaaattacaatatctattgttctagtggcgttaatctatttggttgcacaaaagtttttgagtgtatttatggtgggtacttatattggttgggcgatagatgcgtgcattgttgctagtgtggcaataatgatatctattgtttttggtttgattaattggaaaaacctttccaagttcagccaaaagattatgagaaagaatggaaagtgaatgacatgaaaataggaatacttacatttcaccgtacaagcaattatggaacggtgcttcaagctcaagcaacggtgattgcgttgcagcagatggggttgaatgcggaaataattgattatcgaccagagtataatgaaaagacgcttcgggtaagaaaattgagtcaagcaaggacaataaagacggcgctttcggttttgctaaatcgttttatctatgggaaacaaatagtgaaaaggctccagaattttcaagagtacattgatacgctgaaggtatctcggcaggcggtatacacggaaaaagatgtttgtgaaattacgcaggactatgatattattctcagtgggtcagatcaactgtggaatgagcgtattaccggggaagatatgacatactttttcccgtttgagcatccgtataaaatcagttacgcaagcagctttggtgttagcgagatttctgagaataggaaaaaggaaatagaacctttactcagcagttttcgatatttaagtgttcgtgaaaaaacagcacaaactatgctggaacaatttcttcaacaatcaaaaggagaagttgcatgcgtaatcgatcctactttgttagtgaacaaaagaacatggcacgatcaggcgagcaacagctttacgccacctaaaggcggatatattcttacatattatatgattgagaccccgatccttcgtgcaataacggacgaattgagaaaaaaaacaggtctgcccgtaatcaatcttaaaccatcgaaaagacagatattactacatgaaggattaaatatgatgtgggcgggaccacgggaatttcttagctgttatgcgggagcaaaatatgtggttacaaattctttccatggtacggcatttgcaattaattttgaggttccgatgtatgtggcccccttgccattttcgatggcaggtgaggttaattcgagacttatcgacattttgaataggtacggccttaaaaaccgatggatatcggagctggatgatgtaaagcatttgtcgaatgcgtttaatcttgatatgctacgacagaaaaaagagcagcaatacgaagagtcgattcaatatctgaaaactgcgctggggatgtgagtgcatatgaatcataaaaacaatatttcattaattggcaaagaatgtacaggatgtggactttgtactgaaatttgtccagtaggttgcctccatatggaattgaacgacgagggattttggtttcctcaagtcaacgaggtgaagtgcatacattgtggagtgtgtgcgagaagctgtccgtctcagtgtcatattgaattgaataaaccaaccagcgtttttgcggcagcgagctacgatgaagaggggagccacctgagttcctctggtggtgttttttatgaggcagctcgatatgtaattcaggaactgcaaggctatgtttgtggtgcagctttagatgagaatcttcaattgaagcatcttgttacaaattctatgaatgacgtggaacggatgcaagggtctaaatacattcaaagcgatatttgtgcctgttatagaaccattaaatcatatatattgcaacataagaaagtgcttttttgcggaactccatgtcaggtcgcaggagtaaaacgttttgttggcgatgcagatagcttgctgacaatggacttggtttgtcatggaacaccaagcgcagcggtattctctgaatacatgcacacgcgataccctgaggatagatacataaagttctctttccgccaaaaaaataaacatataaagtctttgttcgcgtatcagtattttgcgataagggaaaaagataagactatgaaaggaaagtgtatccgttcagatcgagatttattttattatgcttttttgaaaggatataactaccgagaatcgtgctatttatgtcaatatgctcaatcatcccgatgtggagatattactataggagattgtgcgaattaccgcgcatatgatcttccgatcaaccgagaattgtccacgctttgcattaatactgaaactggcgaaaagctatggagagcaatttcgaagcgcttttgttatgaagaagctaactatgaaatggagagccgattaaatatgcagctccattcaccagcaaaacgacctagccaaagaaatgagttttatagagatctttctgaattaccctgggatgttcttcagaaaaaatattgcccatcgaagagcataaaagcagaaattaaggatttttttatatggcatacgacaccaaagacgagagaaaaaatcaagtgtttttttcgaccgaacacagtaaaacaaaagagatgagagtaaccttttgttgtactcagtagcgtgagatatccgttctcagttatttgcatttatactttttgcaaaactaattaaggcgcacagtcaggccatcatcgctaaccgccacgacagcattttggacaatgtgcaggagaaagtctacacccgcgatttattcaggcgggattgatggcagtattatacaaaatgtgtactgcaagaattaattggggctggttgtgagaatcagccctttattcccatctccgcgtgtctaatcactttaagcctcagagaaagcaatatacataggtgaaacgaatgaaaagaacggtaatcggtattgcagtgggaaccgggtcgggaaaatcgacgtttacggataggacaatcaatcgtggcatatgtacgtttcgcagtgtaagctattgacgaatcgatcggctcaacttctgggtagatgtcagaatatcgctgcgattgaatacggccaacgggatccgagtattggcgtctttttaaatacatttctgcgctcgaggaattcttcaaagagcataaggaataaaatcatctctgggcatatgacaaatactgcgtcaatctacatgccaattgccaaaaagaatggtgtaacttgtaaaattgctcacagccacaatacacacggaaaagcaggcgtgcttggatatataaccaatttgctgcaaaagtcaatttataaaaatgctacagattggtttgcatgttctaaggtggctgctaagtggttctatccagctgaagctgtcgctgccggcagagtagctgtcattccaaatgcagttgatgcacagaaatttcgttttaattatatatgcagaaataaaaggattaaacgcgcggcagataattcaaggtgtttgtttagatcctcgtattggaacacactataacaatccaagttttggctatggcggctactgcttacccaaagataccaaacagttacttgctaactatgctgatgtaccggaaaatttgattgaagccattgtagaatccaatcgtactagaaaggattttattgcaaatcgctatgataactgtttggataatgtccagaagaaggtttacacgcgtgacttgttccgcagagattaatacattatcggccatgtgtacatttacattgtcatggtatttcacattgctgcctctacagcaattatctcaaaaatatgaataggtaatccagcttaatagaatatttttacgttattacaatagtttatttggataaacaaaagggcttgcctctgtagttttacagacagcgagcccttttttttggttgcctagaaaatgattagaaaaaatattgcccaactttttgggagcatacatgtcaaaggcaatgcgccgcttttacttcagcacaaccttgtggaagatctttttgccctttttgatgatgacgtggcccttttcgaaatctgccgctgtgcaggcctttgaaatatccgtgacctttacatcgtctacggagacgccgccctgctgcacgaggcgccggccctcgcccttggaggggatcagcccaaccttcagcatcaggtcaaggatattgatcgcgccgtccgtcaggtctgccgcggaaatctccgtcgtcggcatattttccgtgtttgcaccgccgccgaaaagggcgcgcgcgctttcctgtgccttgtcggcttcctcgctgccgtgcaccattttggtgagctcataggcgaggatctccttcgcgcggttgagctggctgcccacccaagattccatcttcgcgatctcatcgagcgggaggaaggtgaggagcttgatgcacttgagcacatctgcatcgtcgacattgcgccagtactggtagaagtcgaagggggaggtcttgttcgggtcgagccagaccgcgttgccggctgtcttgcccatcttgttgccctgcgagtcggtcagcagcgtgatcgtcatggcggaagcgtccttgccgagcttgcggcggatcagctcggtgccgccgagcatgttgctccactggtcgtcgccgccgaactgcagattgcagccgtatttctggtagagcgcgtagaaatcgtagctctgcataatcatgtagttaaactcgaggaaggagaggcccttttccatgcgctgcttgtagcattccgcgcgcagcatgttgttgacagagaagcacgtgcccacttcgcgcagcagctcgacgtagttgagctttaagagccattcggcgttgttgaccatcagcgccttgccgtctgaaaaatcgatgaagcgctccatctggcgcttgaagcatgcggcgttatgctcgatgtcctccatcgtcagcatcttgcgcatgtcggtgcggccagagggatcgccgatcattgtcgtgccgccgccaatcagcgcaatcggcttgttacccgccatttgcaggcgcttcatcagcgtcagcgccataaagtggccggctgtcaggctgtctgccgtgcagtcaaagccgatgtagaacgtcgccttgccgctgttgatcagctcgcggatcgtctcctcgtccgtgacctgcgcgatcaggcctctggcctgcagctcttcgtaaattcccatttttgtacatcctttcttctttcgggggcatgaaaaaagccccctgcaatttttgcagagggcggaataaccgcggtaccacctcagttcgccccggactcacatccgaaacctcaacgggtacaagcataccctaacgctgtaacgtgcgcacacggccgcctctacttgaaagcctcgttcgaaacggcggctccggaatgtatttctgcgcgccgccgcacctgctcacaccagccgcaggttctctttgccgacaggaagcgcgtacttctttccatcaaagccgttgcatctattatagggaacacggcgggctttgtcaagcatccggccgaatttttttgagtgcggcgtgcatccggttttgtttttcatccgtatcgagccagcgcagcagcatttttgtgctgagattctcgggtagcccgagtgaaacgagcagcttgcggcgcagtgcggcgctgttcggaccgccggagagaccgagcgaaacgaggtcggcggcggtgagctgcggggccgcctgaggcacagcggccgcatccaccgtcacgccggcgcagcgcagcgcctcgagcagcacctcggccggcacgccctccacgccgagctttccctctttggagggcgcggccttgcgccgttcttttccgtaaatatccgggatataggcgtgacgcacctgctccgccggcagccacgaggcgacgtagctgcggatctgccgcccggcgttgtcgctgtccgttaggatcacaaccccgcgctcggcggcgagctttttaataaaggcgcgcttttcggcgtccttgtagatggaaaagccgttcgtctcgacaatcacggtgtccacaagcgacgacagcttgattttatcgtaccgtccctcgacgacgacggcctcgcgaatcgcaagcatacgcacctccggctcaggccacgtggccgcggtgcgccgcgaaaagcagcttcgaaaagagcttttccagcacaacgcggtccatcgtgtcgccggtcgagagcttcagagagagatcgcagtcgagcaggagggcgatgctctcgcgcagcacctcgagcgagaggtcgcgcatatcgcgctcggcgtatttcagccggaagtcacgccccttatagtcgccgtactccgcgggagccagcgaagttttgccgctttggatcgcggcgcggacgcggtacatgtcaatatacgcgccgctcagcacggagagaatcgtgagcggtttttcgccctgactgatcagcaggtcgagcagggtgtaagccttggaataatcgccgcgcacgagcgcgttgcttaaaagaaagaccgtcgtctccatgttcttcgtgacaatctcttcgatctgctccgctgtgatttcgccgccgcctgcgaaggcgcagagcttttgaagctcgtttgtcagagcgttcaggtcgctgccggcgtagcggatcatgcggttcgcgagcgtgcgggacagcgcgcagccccgcttctcagcctcgcggcataggaacttctcgaggtcgctttcactgcggcgcgcatagcagagcgaacagccggccgcatcgatctttttgatgaaattgcgccatttggcgcttttttttacgtcgatttcgagcgtcggcagaaagaaaatgagcaccgtcgtttccggcacgttttcgatcagctcgtgcagcttgctgagctcggcggcgccgagcgattcgacgttcaagtcggagactgtcacgcacttgcgctcggccatgaacggcagggcctccgcggcgtcggcgatctcgtcgaccgaggccgtgtgcggaaattcgttgtagttgaattccggaaaatccgccgcggcaaacttctttgtcagccgcaggatatcgcgcttgacgaggaatttttcgtccccatagaggaaatacagcggggcgagctgattcttcgagatctgctcccgcagcttgctttcattgatttcaggcatatcgtatcctttccgggcggctcagccgccgtatatcgtatagctgccgtcgcctgcaaagcgcaggcagatatgttcgtgttcgcccgccagaatatagcgtccggtcgggagcacgccggcggtctgccgtgtgtcctccgtttgcaggatcgtaagcgcgccgttcggcacgccgccggccttatccgtgacgcatatatccgcggtttcgccgaaaaatctgccgtctccgccctccagcaggatctgaagcccgccggccgagagctcaatgcagtctccgcggccggaaacgctgtacgccgcggtatcggaaatctgcccgtccgtgccgtaggcgtaggcgataccctgcgtgtccgattcgaccgggaaataaacggaatcgggataaaggacggtggagacgcggaattcctcggcgagcgcctgcgcacagcggatggatttttcatcggactgcacgtggagcaaagcgatgcgctccgcgccgtaatcccgcagcgcactgccgacagccgtgctgctgcccgtacagctgaaaatataggcggcgctgttctcaatgtaggccgtgcaggcggcggtcggcgtggtaaagaccagcagccgcgctccatggctgttcagcgcggcattcgcgcccatcccgacgagcaggacgcccgccgcaagggcataggctgccgcaatgtgccgcccccgcaggatacggaagccacagagcagaaagacgacgcagatcaaaacggcgggagcggcatataggccggcgatgcagagcgtatccggcagagcgccggcgatcagccgcaccacggcattctgatattttgcaagcaggccgctcagaaagacgaacggcgcggcggcgggcgccaaaaccggaaaactgagcaagatcgccgcaagcacgccgaagcggatcagccaggccgaagcgtagagcgcgagcaccgaagtcagcacggcagcgaggttgatgctgccgaatacgtagagctgcacgggcagcgagccgaggatcgcgcagacggatgccgcagcgggcgacaggatccgcgtgagaaactgccggcgttgcacgctttggatgcgcccggtcagcacatccatcatgcgcggcgaaagcgcgatgatgccgagcgtcgcggaaaaggaaagcagcagggaaacgtcgccggcacaaaacgggtttgtgagcgccagaaacaggatggcgaccgcgagcgagttcagcgcgtccgccgtgcggccgatcaaaaccccgcagagcaaaatgatctgcatgatgccgctgcgcacgactgtggcggacatgccggaaaccaccataaaggcgaggataaatgcgatggagatccccgcggcgtaccgccggcgcacgccgagcaggcagagtccgccgagcgcaaactgcgtgacgatcgacatatgcatgccggagataacgaggatgtgcgaggcgccggccacacggtacgcactgttgagcgcatcgggaacattgtcccgaaaaccgagcagcatggcggaaagcacggcggcttcatcggtcggcagcgcacggcgcaggctgttctgcacatgcgcgcgtatggcggcgctgtaataggcgggcggcctgttttccgccggggtgacggcgatgctctcataatcggtgatataggctgcaaaaagcttgccgtgggcgagctgtgcggcgcgcgaggaaagcccgccgttatcgttgaaggggacgaaccgagcggtgcacgagaccgtgtcgccgatctctgccggaagcgcttcgccgtgcgacaggcggaccgagaaatctacggtttggccggtatcctcaatcgcgcacacgcgcgccgtataccggtaatttccggaatagcgctccggctctgattctaaaacggcgcggatgcggtaggtgttgttgagatagcgctcggcagggcgcacggttaaaagcatttgtacggaaaacaccgtcattgcggcggctgctgcgatgagcacgagcatccgcgccgggtgcgcgcggtgctgccgaaaaaggaggcacatggcacacagaattagaagcgccgcggcagcgaagggcgtgacgctttcgccgagaaaaaccgcgagcacgagcgtgccgaaataggagaagccgatataaaccgccgggcgcgacacagctttcatgcggtcacactccgagcagcagacggcggatctcgccgtagcctttgacttcatacgtcaccggcacgccgaccgtgttttctatgccgtcgggattgtaccagatagaatccataccggtgttccgcgcgccgcacatgtcggaggtcaaggaatcgccgatcacgacgcagtcctttgccgcggcgcccggaatatgcgacagcacgtaatcgaaatagcgcttgtccggcttcgccgcgcccgccgtctcagagatgaagcagccgcggatatagggcagcaggccggagttttgcagccgcgttttctgtgaagaggcatttccgtttgtcacgatgtaaatcgggtattgcgcggagagcgatgcgagcagctctgttgcaccggggaaaacagtgcccgtctgcccgagaaattcaaagtacagcgcattgattttatccggatcgcgcggcggcaggccggcttcacggaagaaatcgacgaagcggctgcggtagagctccggttttgtgcacagcccctgctcaaagcgccgccaccagcgttcgttgcaggcattgtaccgctcgcgcacatcggggctgatgggcagtaccgcatgaaagcccgcggcctcgtacatgcgctcgaatgcttccgccatatcgcggttgaaatcgagcagcgtttggtcgatgtcgaagaggaggtatttgtacacgttgcgtcgcctgcctttcatcgggtcagaaaatatgcggcaaagcctgccgccgcaagctgcaagaggataaagagcggcagcaaaagcatgaatttcaagtgcttcgttttgtggcggaccagaagcatggcgataaattcaccggctgcgccgccgaaaaagccgaaaagcaaaagcgtgcgctccggtatgcgccagccgccgcgccgcgcacggcgcttatcggaaacggcgagcagcgccgctgtgagattgactgcggccagatagaaaagaaccgcatacagaacgggctcgggcataattcttccattccctcataattattgttgtatcaggacaggtttatcttaccgcaaatcgcggctttggtcaagcgatacggcacaggtaaccgggataagaaaggaaaaaaggcgtatgattgtactgaaaaaaagccactacattgcggcgctcgtcgttctggccctcgtcgtgttctttgcagcccgcggcggcgtacagccggagccggcacaggccgcaggtacttcgagcctgaccagcgcatcagctgcaccgcagccggaggaaaccgcagccggcatagagccggccgcagagggagcggcggcgcaggcggaggatgagccgctcgtcggcgtctggattccgtacatgtcgctttcaacggcggaaaaaacggaagatgccttcaaggaaaattacgacgcgaagctcgaaagcgcgcgggaatccggcgcgaatgcggtgtttgtccacgtgcgcccctttgcggacagcctgtatccctccgaatacgagccgtggtcgcatattctgaccggcacgcagggggaggaccccggctacgacccgatgcagtatatgatcgacagggcccacgagagcgggatggaattccacgcgtggatcaacccgctgcgcatctcgacggcatccacgccggatactctcgccgaaaccggcttttacatgcagaaccgggaaacaaacccgttttacttcatcgagtacgacggcggcatctattacaacccggcgagcgccgtcgtccgcgagcgcattgcagacagcgcggcggagatcgcagcactgtacgatgtggacggcatccacttcgacgattatttttacccgaccgacgatgaatcgatcgattcgaaccagtacgccgcctactgcgaggagacggatgagccgctcccgctgcacgagtggcgcaccgcgaatatcaacgcgctgatcgccgcagtctaccaacgcatcaagcaggctgcgccggacgttgtgttcggcatttcaccgcagggaaacctcggcaacaacgagaagattaacgcggatgtgtacacgtggtgcgcgcagagcgggtatatcgactacatctgcccgcagctctactacagtttcgagaacgaggcactgccctttgaggaggccctcgaaagctggaacacgatggaacgcctcgacagcgtgaagctgtatattggccttgctgtctacaaggccggcacagatgcggacgacggcacatggctcaatacggaggatacgatcgcgcggcagatcgaacgcgcggaggagaccggcgcggacggtgtgctgctctatgccgtcgactatttggacgcggaggagacgcgcgccgaaatggcgaatgcgcgggtcgccatcgatgcgctcaagccataatccctcatttttgcaaaattgccgccgccgacttgcaaaatgtgcttcccggtgttatacttatgcctaagcaatgaataaagggggactcatcttgtccaacgattacaatgagatttcggcaagactgcgtgagctgcgtgaggccagcgactacacggtcgagcagcttgcggcggagctcggcatggagccggaggtataccgcggctatgaggaaaacggccgggatattccgatcagcctgatctacgaggttgcaaacaaattcggcgtggatttcacggagatcgtcaccggcgtacccgcgaagctcaacagttaccacatcgtgcgccgcggcaagggcaaggtcgtcaaccgcaacccggagtattactttgaggatctcgcgttccgctattccggcaaggtgatgcagccgctgctcgtgacgctcgagccgacggacacgccggccggcctgatcacacatgccgggcaggaattcaatctcgttctggagggaaccgtcgtcgtcaactacgacggcgaggagttcacgctcacggcgggggattcgatctacttcaatccgaccaagccgcacggccagcgctgcggcggggacgtaaaagcgcgtttcctgacggtcatcgcggaatgagataaaagacggacggcgcatggcgccgtgcagcaggggatacagcttgacacgccctgtgtaaaaatataaaaggactgttgcaaatgttacttgatcggtttttgcctcgcatcgaattcgattcctacgaggattttaaggcaaattataaggtgaatgtgcccgagaactttaactttggttttgatattgtggacgcctgggcggacagtgagccggaaaagaaggcgctcgtctggtgcgatgaccacggcggcgaaaaggtgttcacctttacagacatgaagaagctctccaaccgcgcggcgaattttttcaagagcatcggcgtccaaaaaggaacggttgtcatgctgattctgcgccgccgctgggaatactgggtctgcgcgacggcgctgcacaagctcggcgcaatcctgatcccgggttctttgcagctcacgaagaaggatatcgtctaccgcggcaattccgcctcggtgcagacgatcgtctgcgtcaacgacgcgttcgtcatcgaccagatcgaggcggctgaaagcgacgtgccgtcgctcaaaaacaaggttatggtcgtcgaccaccgcgcgggctggctcaacctgaacgacgcgcttgaggcgcattccgatgctttcgagcgtcccgcaggcgcagaggccacgcgctgggacgacaccatgctcgtgtacttcacctccggcacgaccggcatgccgaagatggtgcagcacaatttcgcctatccgctcggccatatcatcacggcgaaatactggcagcgcgtcgaagaaaacaagctgcacatgagcgtttcggactccggctgggccaagttcggctggggcaaaatctacggccagtggatctgcggtgcggtcgtctttgcctacgatatggataaattcgtgccgctgcacctgctcgaaaaaatcacgaaatataaggtcacgacgttctgcgcgccgccgacgatgttccgtttcatgctgcaggaggacgtgacgaaattcgacctctcctgcatccaccactgctgcattgcgggcgagccgctgaacccggaggtctttaaaaagtggtacaatctgacggggctcgagctctgcgagggcttcgggcagtccgagggtcccgtgctgatcgcaaatttcccgtggatcaagccgatcccgggctcgacgggcaagccgtcgccgctcttcgatatccagcttatcgacagcgagggcaacgtctgcgaggacggcgacgagggcacgatcgcgatcatggacgtgaagaacaacccgccgaccggccttttcaccggttatttcaagaatccggagatgacggaggagaagctcggcggcgcctactacgatacaggcgacgtcgcatggcgcgacagcaagggctattattggttcgtcggccgcaatgatgatgtgatcaagtgctccggctaccgcatcggaccgtttgaggtggaatccgcgatgctcgagcacccggcggtcgtcgagtgcgcgatcacgggcgcgccggatccgatccgcggccaggtcgtcaaggcgacggtcgtgctcgccgagggctacgagggcacgccggcactcacgaaagagctgcagaaccacgtgaagcgcgtcacggcgccgtacaagtatccgcgcgtgatcgagtacgtgcaggagctgccgaaaacgctcggcggcaaaattaagcgcgcgcagatccgcaaggcggacgagcagacggactgaccgtatgcggacgccgcccggatagaagccgggcataaaaatacgtgtgcaaaaagcgggagcagactctccgggtctgctcccgcttcatttttatttatcgcagtccgccgcatcagccgtgcgccgctcaatctgcgccctgcaggaagccgatgagcgccggcagttcgctgccgattgtgcgccaatccgtgcggcatattccacggtagccgtcgcgcgccagacggagcgggccgcagagcggctggggaaggcgcgccagtgcccaagtcggtgacctcgtccttcgcggcaatgcgcccggtttccagtgtgaaccacatacgcgcgagcgtcagaagcacgttgcgctcgtcgcccgccggattttgcagcagcgcaggcagcgcaccggcgatcgcgcgccggaccatctccggagagaccggttcgatccacgtgcacagcgcgccgccgtataggggctcgccgtaggtctgcgcctgccaaagaagcagcgcgagatcgggatctacgtaggcgcccgggattttgcctgattccaatgtgccgcgcagccattcgccgtacatgtattcgcagaccgacgggaatacggccgccgcggcgttaaaaaccaccgtgacctcaaacgggcgtttctccatacggcccacaggaccgaagtgcgcgagaagcaccttggtcagcgccttgcgctccgcaccggtcattggccggccgagtacggccagcaggtcgatgtcgctgtccgggcgcaggccccgtgcacggcagggccatacagatagaaaccaagcaggctgccgccgaacagcgggcggacggcttccagcacctgctgggcctgcgcggggatctcagtctgcatgttcatccgctcccgtctgctccgcaatcctgccgatacagtgcgtgtcggtgcatgactcgatctgcacggtgcggatctcaccggcaagcgatgtaccgctcgccgcgagcaccggcgtgtagttcatcgaatagccctcgtagacgccgggctgcactgcgcgctcgaagagcacctgttccgtgcggccgatctgcgcgccgaaaaaggcgcgctgcgtttccgccgtggcgcggatcatcacgcggctgcgcgcctccttgacggcgttcgtgagctggtcgcccatgtcgtacgcacgggtgccggggcggcgggagtaggcgaacacgtgcaccttcgcaaaggcaatctccttcgcaaaggcgagcgaggcctcaaattccgcgttggtctcgccggcaaagccgaccataatatccgtggtgaccgcggcattttcaaacgccgcgcgcagatttcgcacgatcgtgcggtattcgtccgccgtgtagtggcggttcatgcggcggagcgtcgcgtcgcagccgctctgcagggaaagatgaaactgcgggcagagctttttctgcttcgccatgcgccggatcacatcctcggaaagctgctccggctcgagggagccgagccgcacgcgctcgatgcccggtaccgagcaggccgcttcgatcgcgtcgcacaggtgcaggccgaattcctgcccgtaggccgaaaggttgatgccggtcagaacgacctctcgaaagccgtttgcggcgagcgcgtgaagctccccgcggagatcctcgagcggcttggagcgcacgcggccgcgcgcataggggatgatgcagtaggagcagaagcggttgcagccgtcctcaattttcacaaaagcgcgcgtgcggccggaaaagctatccacctgcaggcgctcaaacgcttcgccgctcgtatgcggctcgatgtcgatgatccgctggcgcgcggagagaaaggcgagaagatccggcaggagacgggcgcggttcgaggtacctagaatgatatcggcctcctcgagccgcttcgcgtcctcgggaaacgcctgcgccatacagcccgagagcaccatcacggcgtcgggattgtcctttttcgcgcggcggaaaacctgccgcaccttgcggtcgctttccgccgtgaccgtacaggaattcagcacgacgacgtcggccggctcgccgtcctgcgctgccgaaaagccgtttttcaaaagactggagagcatggcctccgattcgtattggttgaccttgcagcccagtgtgatcattttaactttcattttcgctgttttcctccagccagatattgagtgccgtccattcgttcatcagcgcgtcggagcgctccttgcaggcggcaatctgattcgtgatttcaagcgtctgctcgtagttgctcgcgacggcagggtcgagcagcttttcgttcagcgcttcgatttcgagctctgcggcctccacctcgcgctcacagcgggcgagcgccgccttctttttgcggatttccgccgcgcgctcctttttctgcttgtaggcgtttgcgcgcgccgtattttcctgcacgacggccgtcgccgcctccgttttctgccgcgactcaaggtatgtatcgtaattgccgaggtagagcgttgtgccggtcggatcgagatagtagatcttatcggcgagcttattgatgagatagcggtcgtgcgagacgacgaacagcgtgccgtcgtagcccatcagcgcgttttcgagcgcctcgcaggagccgatgtcgaggtggttcgttggctcgtcgaggatcagcaggtttgccttcgaaagcatcagcttcaaaaggagcacgcgtgcgcgctcgccgccgctcaggcccttgacgggcttgtatacgtcctcgccccgaaacagaaagacagcgagtgcagagcgcacctgcgtctggttcatatacgggtgcaggtcccagatctcgtcgatcacggttttgctctcgtcgaggttgccctgtgcttgatcgtagtatccgacgtcgatatttgcgccgaagcggtaatcgccgaaggtctgctgatagacgccgagcaggatcttgagcagcgaggttttgccgcagccgttcgggccgatcagaaataccttttcaccgcgttttatatcgagattgacgtttttaaaaagctggttttcaccgaagcgcagcgccagctcgtccgccatcagcacatcgttgccgccgcgctggctggccttgaactgaaagcggatcgaatccggctcgtcctcgggcttttggagcgtcgcctccagccggtcgatcgacttctgcttgctcgcgatcgtcacgtaattgcgctcctgattgaagcgcttctgctgctcgatgattccctcgatgcgcttgatttcgcgctgggtgttgtcgtacacgcgctgcatcgcgaggcgtttttcctccttgagatgcaggaatttcgtgtaattgcccttgtactccgtgaggtgcgtgttctcgatctcaaaggtgcggtttgtgaccgcgtcaagaaaatagcggtcgtgcgagataacgatgtacgagccgccgtagcttttcaaaaaatcttcgagccattcgacggaggggatgtcaaggtggtttgtcggctcatccagcagcaggaggttggattcgccgagcagcatttttgcgagctggattttcgccttctgtccgccgctcaagacgccgatcggcgccgcgatctgctcgggctgaaagccgaggccgatcagcgtgctgcgcgcgcggctgcggcaggtgaggccgccgtccgcgatgaagcggtcgttcagctcggtctgctttaaaatcagcgcgtcgatgttgtccggcacggcggcgatctccgcgttcagccgctcaagctccgcttccatcttcaaaagcggctcgaatacggtcatcacctcgtcaaaggcaggcttttccatgtcgcggcagacgtgctgctccatgtagccgaccgaggtgtcgcgggccggcgtaaagctgccctcgtccgcgctgtattcgccgttcaaaaccttgaaaagcgttgtttttccggaaccattgatgccgacaaggccaattcggtcgcccttctgcacttcaaaggaaatattttcgataattgtatcggtgccaaacatcttttttatgttattgaccgttaaaatcgccatgatgtgtctccctcaatccataatccatattattatagcggattccgcccggcaaatcaagaaaagttcacggattttcggttgataatcggtttccgccgcgctataatgaaaaacaaagccggagacacagcagctccggcacggaaaggaagcatgctatgcgcgtcggtatatccgcggcctctctgtatccgatgaaaacggagaaggcgctctgtcatttgaacgacctcggctacacgctgtttgagatcttttttaacgcttactgtgagacgcagccggatttctgcgcgctcttgaacggcctgcgggcgtcgcgcggcgcagagattaagtcggtgcatccgtttacctcgtctctcgagtccatgctgcttttcgagcggtacgagcgccgcctcgaggagggcctcacgctctacaaaaactatatggaggcggcgaagcgggtcggcgcggagatcctcgtgctgcacgggcagcgcctcggcgccggctcgctgagcgaccgggaatactgcgcgcgttacagggcgctgtaccgggccgggcaggcgctcggcatcacggtcgcacaggaaaacgtgcggctgttccgcagcgcgtcgccggaatttatccgcaccatgcgccgcgagctcggcgcggaatgcgcctttgtgctcgacacaaagcaggccgtgatgagcggctacgcgcccgagcagcttgtggaagccatgggagagcgcctcgtccacgtgcatctgagcgaccacacggaaacggagagctgccttctgcccggcgagggcagcttcgaccttatcgcgtttaagagcgcgctgtgcggcgtcggctacacaggggatgtgatcaccgaggtgtaccggccgtctatccgcgatgacgccgcgctgcaaagggcgctttttgtcacaaaatcggtttttgaggaataaagctgcattttttcttgatttttggaggatccctgtagtataataaaaaataatcgaccggcaaatatttttgggagggtttaccatgaagtgcccctattgcggatacagtgaaagcaaggttatcgactcgagaccgaccgacgagggcgaacgcattcgccgccgccgcgagtgcctgaagtgcacaaagcgctttaccacctacgaggtgatcgaaacggttccggttgtcgtcgtcaaaaaggacaagtcccgcgagacgtttgaccgcaataagcttctgaacggcctcctgcgcgcctgcgaaaaacgcccggtatcgctcgaaacgctcgagcggatcgtagacgaaatcgaagtgctgctgcaaaactcgctcgaccgcgaggtgccctcgcacatgatcggcacgtatgcaatggagaagctcaaagctgtggacgaggtggcgtatgtgcgctttgcgtccgtttaccgccagtttaaggacatcaacagcttcatggaggagttgagcaagctcatcagcagcaagaactgaggtgtgccatatgaatgaaatttgcggcttaggctgctgcggctgctgcgggagcaggaatgcctgcggcggttgtgcagagacggacggccatcctttcggcggctcctgcattgcggcggaatgcgtgaaaagcggcggtacagaggcgatgctccggtttaaagcggcgctgatcgcagagatcaacgcgctcggcattccgggccttgcagtccgcgatatgaatcttctgatcggctcctacgtaaacctcgaatacacgctgccgagcggcgcgcgcgcaaagctgctcgaggacaaccgcgtgtactggggcaatcaggtggaaataccggacagcccgcgctgctacggacttgtggcggacaaccgccatctgctcgtatgcacctacggctgcggcgggtcggatccagaaattgttttatacaaaaagagatgaaataagaatggggctgcggcgataaaccgcggccccgcttttatatcttcttgatccatttgcggctgtgcagccggaatacgcaccacacggccttgatgatctgatcgatcttgagacaggtgtaaatgaggaacggcgaaagccgccagtacaggccggcaagggcgccgagcgggacgctcgcggcccacaggaagaggatatccgcgagcatcaggaattttgtgtcgccgccgccgcgtagcacgccttttgtcaaaatggaattgaccgcctgaaaaaagacgataaagccgatggcaagcatgagctgctcggcgatttcatgcgtttccggcgtgatatcgtagaagctgatcacgagatcgctgatcgcggcaatcaaaacgccggcaaacagaccgatcgcggcgccgaggccgagaaaggtgtagccctgcttctgcgcgcgctccgccttgccctgtccgagcgtgtggccggtgatgatggcgctcgcattggagatgccctgaatgaacacggtggaaagctgcatcgtgaccgtcgtgatcgcgttggcagaaacaaaattcgcgccgaggcggccgacgaccatcgcgacggcgttgttgccgaggccgagcagcgtatcgctgatcaaaaccgggatgctgatacgcaggtattcgccgaccatgtcgcggcatttcatcaacaaatgacgcaggcggtaggcgatcttcttttccacaaagaggaaatagccgcagataaaagcgaactcaaagcaccgcgagatcagggtgccgagcgccgcaccctccacgcccatggcgggcgcgccgaaatttccgaaaataaagatccagtttgcggcgacgttgatgaaaaacgcgacgatcgagcagatcagcggcagcttgacctgcccgatgctgcgcagcacgatggtggtcgtcagcgaaaagcccagaagccagtagcaggggatgctccacttgaaatagccgatgccctcgcggatgacgtcggcgtccgtcgtgtaaatctgcatcagcgcgccgggcgccgcgatcgtcgcgaccgtaaagccgagcccgatcacaaagcagaggcggtacatgatcgtcaccgccttttgcagggccgatatgttctgcatgccccaaaagcgcgcggtcagcaccgaggcgcccatgccgatgcccatgcagcagatctggaacagcgtgatgaactgatttgcgaggctcgaggcggagatcgcgacctcgccgagcttgccgagcatgatcgtgtccatcatattgacgccgatcgtgatgaggctttgcagcgagatcggaattgcaattttggcgacattttggtaaaacgctttgtcgccgagataggttttaaattctgcccttgtcattgttctgttgcccacacctttcaataattcctccatttagattccagtatagcagagtttagttgcaaagtaaactatatttgcagaaaaagtggggaataaaacgaaaaattgtacgtacaagtattgaaaaataaaaaagaagtggtagaataggaggcagcaaaacgctgtgcactgcgcagagagaagaggtaacgcttatgagcaagattatcgtcaacacattggataagaagaacaaaatcaaccgcaatatctacggcaacttttccgagcatctcgggcgctgtatttacaacggcgtctatgtcggcgaaaacagcgatattccgaacgtcaacggcatgcgcaccgacgttgtggaggcgctgaaaaatatcaagctgccggtgctgcgctggccgggcggctgctttgcggacgagtaccactggaaggacggcatcggcccgaaggaaaaccgcaaaaaaatgattaacacgcactggggcggcgtggtggaggataattccttcggcacgcacgagtttttggagctctgccggcagatcggctgcgagccgtacatcaacggcaacgtcggctccggcaccgtgcaggaaatgagcgaatggatggagtacatgacctttgacggcgtttctccgatggcagcgctgcgcgcggagaacgggcatgccgagccgtggaaggtaaagtatttcggcgtgggcaacgagagctggggctgcggcggcaacatgcgcccgtcgtactatgcggatctctaccgccgtttccagacctatgtgcgcgactacggcgagaacaaggtgttccgcatcgcctgcggcccgaataccgacgattataactggacagaggaggtcatgcgcatcgccggcgggtatatggacagcctaagcctccactactacacggtgcccggcgactggaacaaaaagggttccgcaacggacttcgacgaggcgatgtattaccacacgctgaaaaaggccttctatatggacgagcttgtcacgaagcacgcgcagattatggatcggtatgacccggagcacaaggtcggcctgatcgtcgacgaatggggcacttggttcgatgtggagccgggcacgaacccgggcttcctctaccagcagagcaccatgcgcgacgcgatggtcgccgcgctgacgctgaatatcttcaacgcccacagcgaccgcgtcgcgatggcgaacatcgcgcagcttgtcaacgtcctgcaagccgtcatcctcaccgagggcgagaaaatggcgctcacgccgacgtaccacgtgttcgacctctacaagcaccatcaggacgcgacgctgctcggcacgtttgctgaaacagaggcggtcggcgtcggcgacgacaccgtgcagaacctcagcgtatcggcctccgaggatgatgacggcgccgtgcatatcacggcggcaaatctttcggcatcggagtgctgcccggttgagctcgagctgctcggccgtgcggacggcaaggtcagcggccgtatcctcaccggcagaatggacgcgtacaacgacttcgactgcccggagaatgtcgcgatccgcccgatggaggggttgttcatcgaaaacggtgtgatccgctgcacactgccggcctgctcggtggcggagatcacgatcgcctgatggccgaggtgttttgcaggcgctgcctcttaaaggatatgagcgattcggagttctttgaatccgtcagcgcgtatgtacagaatatcccgcccgagcagaaggcgccggaaacgctttaccgcgagcggctcggaaaatgtacggcgtgcgaccagctcgtcaacggcatgtgcgcgctgtgcggctgcttcgtggaggtgcgtgcggcgcggaggatccggcactgtgcaaaaagcagcgatatttggtgaatggcaaaaacgacatacgcgcgcttgttttccgcggtaaattgtggtatacttgtcccgagggcaggtatgccacttttcttttggaggatgatgcagtatgttgcagcaggttatgacggcgcccgggaagatcgagttccgggaaattgaaacgccggcgccgaaggccggcgaggttcttgtgcggatcatgaagatcggcgtctgcgggtcggatatccacgtctggcacggcgagcacccgttcacgagctatcccgtcacgcaggggcacgaggtttcgggcgaaattgcagcgctcggcgcagatgtcgagggctttgaagtcgggcagaaggtcacgatccagccgcaggtcgtctgcggaaaatgctatccctgccgccacgggaaatacaatctctgcgaatccctgaaggtcatgggctttcagacaacgggtgtcgcctcggaatacttcgcggtcgccgccgaaaaggtcacgctgctgccgcaggagatgagcttcgacgagggcgcgatgatcgagccgcttgccgtcgccgtccacgccgtgcggaaattcggcggcatcaagggcatgcgcgttgcggtgctcggcgcggggccgatcggcatcctcgttgcgcaggctgccaaggggatgggtgctgaaagtgtgctgatcacagacgtcagcgcgctgcgcctcgaaaaggcgaaacagtgcggcgtcgattactgcgtgaatacgcgggagaccgatttcggcgcggcgctcgtctccgccttcggcccggacaaggcggacgtcatttacgactgcgccggcaacgacgtgacgatggggcaggccatccgggatgcgcgcaagggcagtacgatcattctggtcgccgtttttgcgggtatggccaaggtggaccttgccgttttgaacgaccacgagctcgacctcaacacgacgatgatgtaccgcaatgaggattacatcgaggcgatcgcgctggtccgcgcgggaagggtcgacttaaagccgctgatctcaaaacacttcgcctttaaggattatgctgaggcgtaccgatatatcgacgaaaaccgcgagacgacgatgaaggtgatcatcgacgtgcaggcatgagcctgcgatcaaaaaacaaggataggagactgctatgctggatgttctgctggacgcactgatcgattctttgaaaatgctgccgtttctctttgcggcctattttctgatcgaatatcttgagcacaaggcaagtgaaaaaatgacgcgcagcctgcaatctctcgggccgtgggggccagtcggcggcgcggtgctcggcattgtgccgcagtgcggcttttccgttgcggcggcgaacttctatgcgggcaggctgatctcgctcggcacactgcttgcggtgtttatcgcgacaagcgacgaggccattccgattttgcttgcgcatccggatcagctcggttatatcgggccgatgcttctcatcaagctgatttcggcggtcgcggctggtctgcttgcagaccttttcgtgcggcgctttgtgaaaccgcggcgggagaagccttttgaggagctctgtgccgactgcgactgtgagcaccacagcgttctcgtttccgccctgcggcatacgctggaaattttccttttcatcctgcttgtgaacctgctgctcggcctcgctttttaccttgtcggcgaggagaatatctcccgcgtgctcttgagcggcagcgcgttccagccgtttttgacggcgctgatcggtcttgtgccgaactgcgcggcctccgtgcttctgacggagctgttcgtctcgggcagcctgtcgttcggctcctgcatggcggggctctgcgccggcgcgggcctcggccttgtcgtgctgttccgcacaaaccgccggatcagggaaaacctcgcgattgtgggcgcactttacggcgtatccgttgtgacgggactgattgtcaatttcatcgcataaacatgcaggcggcggccggatgcttccggtctgccgctttttgtgtgaaacgcatttttcagagctggaatttggggctgagcccgatttccagacgcataaaatctggagggaaaatcgatttatggaaagagacaagctcgaaagcatgcggcagcgcaaccggcggctgatcgatgcggtgatcgaaaaagcagggcgcgtctgtccgggctcgctcgcgatgatctgcgtttacggctcgttctgcacgggcgatgtcaccgcacactcggatttggatctgctgattctgatccgcgacgagcgcggccgggcgctctccagcggctttttgattgacggcatcggtttcgatttctactgcaccacatgggaaagccttgaggcggaggctgcttacacatcgccgcacattgcaaagctgatggattctgaaattgtgttctgtccggaggaggccgaccgcacgcggttggaggccctgcgtcaaagggtgcgggaaatctgcggtgcgtcgtttgcggcggacgatctcacgcgtgcagagcagccgctgttttctgccgagcgcgcctttgcgcggctgctgtgtgcggcaaatatccgggacagccgggcggcggcctgcgaaatgctgtgtgaactggaaagtgccgtttgcctgctcaataaatcctactttcggtgcggcgtaaagcgtgtttttgaagagctcggacgtctgccggagactccggagaattttgagccgctcgcacggcggcttgcggccgcagcatccccggaggaaatgcgggaaacggcgcattgcctgatgcgcgcggtatacggttgcttcgaccgcgtgcgcggccggatggctgcgcggcgggagacgcccacaccagaagacctgcgcggcacgctggaggaggtcgtctccaattggcgcggcaaactgatcgaagccgccgtgcacggcgacgcccatgccgctttgatggcgctcggcagtgcgcagatctttttcgacgaggctgccggcgcgtttgatatgccgcgctatgacgctgtttcctgttttgacccggcggatctgcgcgggacggcagaacgatttgacgcgattctccggcaatatgccgcgcagtacgcgcgcgtggggctcgttgtatccacctttccggacacggacgcttttctggatgattacctgcgcgtgccggctaaagccttcggcacggcgtgaaaagcaaacaaattgcaaattttcggggatttccccgcttagctcttttaaaatgaaatttcctgtggtataatatcgggtaaaatagcatatttatgcaggtatgctggattttgattttaaaaaacagaagggcagattctgaatgacaaatacgattttggaacgcaaggactgcggattgcgggcttttgcctgcgaaaccccgcagtttaagacggcgcggctttccgcgcacctcgtgctgccgctgacaacgcccgaagccgcggccgcccatgcggtcgtgccgaatatttcggcgcgcgccacacgtgaatatcccgattatacagcgttcggcaagcggctcgccgagctgtacggcgcgtccgtgcacgccggcgtgagccggatcggcgacagccagatcctgacgctcgcggcctccggcattgcgaaccgctacgccttcggcggcgaggacgtacaggccgcactggccgaaatcctcgaaagcatcgttttcacaccgctgttcgatgaaaacggtctttttcccgaggacggtttccggcaggagcagcgccagctcttggagacgctcgacgcggagttcaacgaaaagcgcatctatgcgaagcggcgctgcacggagctgatgtttgccggggagcctgcgggaatcccgcagtccggcacgcgggaggcgatccgcaccgtcacacgcgaatcggccaaggccgcgtgggaaaacgccgtgcggcacgccgccgtgtgccagttctcgatcggtgacggggcggacgcccgctttgccgagcgcttcgctgaaaagctcggcgcgcgcgcggttctgccgacgaaaaccgtgccgcacccggcaccgcagcgcgtaaaccgcgtgaccgaagagatgccgcttgcgcagtcgaagctcgtgatgggcatgcgggccggcacgacgccgaaagagcgccttgtcacaaagctcacggccgccatcttcggcggcacgccgagctccaagctgtttttgaacgtgcgtgaaaagcagagcctctgctactactgctccgcgcggcacgatacgccgaaaaacgtgatctttgtcgaaagcggcgtggagacgaaaaacctcgaccgcgccgaggaggcgatcctcaccgagctgcgggccatgcaggccggcgagatctccgaggaggagattctgcacgcaaagctcgcgctgtgcaacagctacaattccgtggctgactccgccgcctcgatcgagagctggtatctgagctgtatgttgcaggacagcgtgcacgcgccggaggaggacgcggccgccgttatggagatcacgaaggatgaaattgtcagcgcggcgaaccgcttcgcgctcgatacggtttataggctgaaaggagatgcaaaagccgaatgaatacggtaatcagacgggaaagcaagctgctcggcgaaggctacgactgcgtgaagcatccctccggcctgacgatcctcatttatccgaaggaaaaaatgcgcagcacctatgcggtgttcggtacgcgctacggctcgatcgacaaggtcttcaagcgcagcgacgagccggtagccgaggcaacgccggcaggcatcgcgcattttctcgagcacaagctgtttgaaagcgaggacggcgacgcgttcacgcgctacgcggcgatcggcgcctctgcaaacgcatatacctcctttgaaacgacgcgctacctgttttcctgtacggaaaacgcggaaaaggcgctcgagattttgctcgatttcgtccagtcgccctattttacggcgcagacggtcgagaaggagcagggcatcatcgggcaggagatcaagatgtacgacgacgatccccagtggcgcgtcctattcaatctgctgcgcgctctgtaccacacccacccgatcaaggacgatattgcgggcacggtcgagagcatcgcggagatcacacccgaatacctctaccgctgctacaacaccttttacaatctgaataacatggcgctgtgcgtctcgggaagctgcaatgcagccgaggtactcgcgctgtgcgataaaatgctgaaacagagcgcgcccgtgcaggtagagcgcgtctttgagccggagccggacgcgatcgtccagcccgctgtggaggagcggctcgccgtggcctcgccgatctttgagttcggcatcaaggaagccgtgcgcggcgagcaccgctcggaaaaagaccttgcggtgacggaggttctgcttgatatcatggcctccgacagctcaccgctgtttcggcggctgctcgacgcttcgctcatcaacgaggcttcgttcagctacgaatacttcgagggctccggctacggcgcggtgctttttggcggcgaatcgagcgacccgcatgcggtgtgtgcggcaatccgggaggagatgcgccgcctgaaggcggagggcgtttccgaggaggatgtgcgccgcagcgcgaaatcgctgtacggcggcaatcttgccggcctcaacagcccggaagtcatcgcgaacgcggcgatgtcgatggagttcagcggccgcgagcttttccgctacatcgagtgcttttcggagatcacggcggcggacgtcaacgcgcggattcagtcgcttttcaatgaggacaaaacagcggtgtccgtcatctggccgctggaggaaaacgcctgattcccgggcgctaaggaaaggatacaaaaattatgacccatcaggttcagtttccggagctcggcatctcgctcgaggtcaacccggtcgcgctgcagctcggcgatttcaaaatttactggtacggcatcatcatcggcgtcggctttctgctcgccgttctgtacggcttcgcatcgtgcaaaaaaatgaatatcaacaaggaccacctgtttgatgcgatcatcggcggtttgatcggcggcatcatcggcgcgcgtctttactacgtgctgttttacccgggcgacaagtatttgcagaacccgcttgagatcttcaacatcaaggagggcggcctcggcatttacggcggcatcatcggcgcgctgctcgtcggcggcctgatcgcaaaatggcggaagatgaatgttttcgccgtgctcgacgtggcttccatcggtttcttgatcggtcagggcgtcggccgctggggcaactttgtcaaccaagaggctttcggttcggcaacggatctgccgtggggtatgtacagcgaccgcacggcgctcgaggttgtcggcaatgtgcacccatgcttcctgtatgaatcgctgctctgcctgctcggctttgtcgtgctgcatttctttacgcgcaaatgccgccagtacgacgggcagacctttttgctctacatcgtttggtacggcgtgacgcgcttctttatcgagggcctgcgcacggacagcctgctgctgccgggcatcgacctgcgcgtttcgcaggtgctggcgggcgcttcggcgcttgcggccgtcgtgctgctcgtcgtattccgcaagtgccgccgtctgagcggctgcggcagccgctctgccatggaggcgaacggccttctggtcgaggaggaaacgggcacggagatcgatacggcggcggagagtacgatcttcagcggtatgagcgccaaggaggcggaaagcaaggtcgaggagggcctcagaaaggcgaaatcggcggacgcagaagaggaaaacgcgccggcggcggaggaagattccgcaccggctgaggaacatacaggcgacgcggacggcgagggggagagcaatggcgattcggattgacggcaaggccgtcgcggcacaggtgcgggcgcaggtcgcgcaggatgcagccgcgctcaaggcgcgcggcgtgcagcccggcatggccgtcgtactcgtcggagacgatccggcctcgaagatctatgtgaacaacaagaaaaaggcgtgcgcggaaacgggcatctattccgaagagcacattctgcccgcggaaacaacgcaggaagagctgctcgcactgatcgaaaagctgaatgcggatgaaaaaatccacggcattctcgtgcagtccccgctgccgaagcatctggacgaaaagctcgtggtcgagcatatcgacccgcgcaaggatgtcgacgccttccacgcgtacaacgtggggcggatcatgatcggcgactacacgttcctgccctgcacgccggccggcgtcatcgagctgatccgctcggccggtgttgtgatcgaaggcaaaagctgcgtcgtggtcggccgcagcaatatcgtcggcaagccgatggcgatgctgctcctgcactgcaacggcacggtcacgatctgccacagccgcacgaagaacctcgcggaaatctgccgcggggcggacattcttgtcgcggcggtcggcagggcgaaaatgatcacggcggatatggtgaagccgggcgccgtcgtgatcgatgtgggcatgaaccgggacgagaacggcaggttgtgcggcgacgtggattttgacgcggtcgagccggtcgtgtcgtacatcacgccggtgcccggcggcgtcggcccgatgacgattgcgatgctgatgaaaaatgcagtgcgcgcggcggagctccagtgcggggccaccgcgtgcgagggaaatgcgtgagtgctgctttcacgccgcgtttgggccgctttgtccggcagtgcacggatcaggcggcgcaaatccgatagaaagagtgatagaaatgggggcattgctccagaatataaaggctccgaacgacgtcaagaagattgcagacgcagaacttccggcgctgtgcgaggagctgcgggaaaaaattatcgatacggttgcggataacggcggccatttggcctcgaatctcggcgtagtggagctgacagtcgcgctgcaccgcgttttcacgctgcccgaggatgcgatcgtctgggatgtcgggcatcaatcctacgcgcacaagctgctgaccggtcgtgccgaggcattttccacactgcggcaggagggcgggctgtcaggctttccgtcccgctcggaaagtgcgtgcgacccgtttacgacggggcacagcagcgcgtcgatttcttcggcgctcgggctttcggtcgcgaagtccctctccggcgagccggggcatgtgatcgcggtgatcggcgacggcgcgctgaccggcggcctcgcctacgagggcctcaacaatgccggtcggctgaaccggaatttgattgtgattttgaacgataacgcgatgtcgatttccaaaaatgtcggctcgatggcgcgctatctctcttatgtgcgcgcaaagccgggctatctcagtgcgaaagacagcgtggaggcggcgctctgccgcgtgccgaaaatcggtgaatccatggcgtccggcgtccggcgcgtgaaaaatgtcgttaaaaagaatattttcaacacgacgatttttcaggatatgggcttcagctactatgggccgttcgacgggcacgatttgaaggagctggtctccgttctgaacacggcgaagtcgatcgacaagccggtgctcattcacatccgaacctataaaggccgcggctacaaatacgcggagaacgacccgggcatgtaccatggccttccggcattcgaccgggaaaagggcgccggagaggccggaacgcagggattctcccatgcgttcggcgagacgatgtgcgcgcttgcctcggcaaatgaaaaaatttgcgccgtaacggctgcgatggaggcggggacggggctctccgaattccgcgaaaaattccgcagccgcttcttcgacgtcggcatcgcggaggagcacgccgtcaccttctgtgctggtctggcgcgcggcgggatgatcccggtatttgccgtgtattccacatttttgcagcgcgcgtacgaccagctcatccacgatgccgcgctgcaaaagctcaaggtgattctggcaatcgaccgcgcgggcgtcgtcggcgaggacggccgcacgcatcagggcgtttttgacgtcgcgtttctgcatacgatacccggcattcacgtctatgcgccgacgtattacgacgagctttcggacaacctcagcgactgcgttgagggagaaagccgtctctatgccgtgcgctatccgcgcgggaaggcgctttaccgccccgcggggtacaagctctccggcaggccgttcggcgtgtacggaagtacagaatcgcaggttgcggttgtgacgtacggccgcctgttttcctttgcctacgaggcgatgcagacgcttgcggcgtccggcataaaatgtaaggtgataaagctcaaccggatcatcccgctcgatcccgaggtcttgcagattctgacgggctgcaaaaccgtgttcttcttcgaggagggcatccgcgcgggcggcgtggcggaatgtctcggcggcgcgctcgcggaggccggcttctccggccgctacgtgatgcgctgcatcgaggacggctttatccggcacgcgccgatgttccgcattttggagcgcctcggtctcgatcaggccggcatgctccgcaccatacgcgagaatctgaaacagaaatgatggttgaacatgaaaaagagaatcgacgtcctgttgtttgagcgcgggcttgtgccgagccgtgaaaaggcgcgtgcgctcatcatggcaggcagcgtttatgtgaataatcagaaatttgacaagccgggcgacaccgtcagcgacgacgcggcgatcgaggtgcgcggcagcgcgctgaaatacgtgagccgcggcggcttgaagctcgaaaaggccatgcagctttttccgatcacgctggagggaaaaacctgcatggacgtcggcgcatcaaccggcggtttcaccgactgcatgctgcagaacggcgcggaaaaggtgtacagcgtcgacgtgggctacgggcagcttgcatggcagcttaggcaggacccgcgcgtcgtaaacctcgagcgcacgaacgcgcgctacctgacgcgcgagcaggtgccggaggagatcgactttttctcggtggacgtgtcgttcatctcgctgaaaattattctgcccgccgtgcggccgctgctgaaagacggcgggcaggccgtctgcctgattaagccgcagtttgaggcggggcgcgaaaaggtcggcaaaaagggcgttgtgcgcgataaggcggtgcacgaggatgtcgtcgagacgatctgcggctttgcgcttcaaaacggctactccgtgctcggcctcaccttttcaccagtcaaggggccggagggcaacatcgaatacctcgtctatcttgaaaaaagcggcgcgcccgtgcgtatggcggaggaaacaccgcacggcgttgtggaagcgtcgcacgcggcgctggacacgaggaatatataattttcgcgcgcttcaacacggcgcagaaaggaacagctccgatgaaaattgcggttataccgaacctcgacaagcgcgatgcggcggaatacacggcgcgtatcgtcgccctgctgcggcagaacggcgcggaggtgctgatgcacgcgtcgctggccgagcgctataagggcgcggttccgtgcgcctcgcatgaggacatggccgcgcgctgcgacatcgttatcgcggtcggcggcgacggcacgatcatccacacggcgaagcatgcctcgcgcgccgaaaagccgattcttggagtgaatctcgggcggctcggctttctggccggcgtggagcgcgacgagctgtatctgctgcgccggctgttcagcggcggctacaccgtgcggcggcgcatgatgctggagatcacggtgaacggcgatgagggggagcacacctactgcgcgctgaacgacgccgtggtttcgggggcacagtccaaaatattcgatttcggcctttccgtggacggctcggagatgtaccgcttccgggcggacggcttgatttttgcgacgcccaccggctcgacggcatactcgctttcggccggcggcccggtgctagacccggagatggacggcatcgttttcacaccgatctgcccgcactccctctttaaccgcagtacggtattcagtgccgacaagcgcctgaccgtctctgccgacagcgagtaccgcggcggcgtttatctgacggtggacggcgacgatccgatccgcatcgcgcgcagcgacacgatttccgtgcgccgttccgcacgctgcacgtcgctcatcaaaatggacgaccgcaatttctatgatattgtgaatcgaaagatcctgcacagcgggagctgagcatcacagcgggagctgagcatccgagtaaatctttatggagacggaggaaaagaaatgaaaaccagacggcatgcaaaaatactcgaactcatcaaagcacaggatattgatacgcaggaggagcttctgcgcaatctgcgcgcctgtggctttgacgtgacgcaggcgacggtttccagagacatcaaggagctgcggctcgtcaaaagcctttcgagcagcggcaagtataaatattcgaccggcagggacaacgcaagggacatttcctcgaagttctattcgctgttcggcgattccgtcatccatgtggaggcagcggggaacatgatcgttgtcaagtgcatgaccggtatggcgcaggctgtgtgcgcctccatggacacgctgcattttccggatttcatcggcacactggccggtgaggacacgattctgatcgtctgcaagacgagcgagatcgcgctcgaaaagcagcaggaactccagaagctgatcggtgggatttgacatgctgacacagctttatatcgacaacatcgccgtgattgagcgcgcggcgatcgatttcgagccgggcttcacggtgctgaccggcgagaccggcgcgggaaaatccatcatcatcgacgcgatctatgcggtgctcggcgagcgcacatcgaaggaactgatccgcacgggcgcggagcaggcctgcgtttcggcgctgttcaccggcatttccgcgcagaccgaagcggtgctgcggggattcggcatcccgctcgaggaggacggcagccttctgatccggcgggagatccgccagcacgggcggtcgagctgcaagctcaacaactttccggcgacggtttcgatgctgaaggctctcggcgccacgctgatcgatattctcggccagcacgaaagctacaagctgctggagcccgaaacgcatggggcgtatatcgacagcttcgcaggcacgggcgcgcttttaaatgaataccgtgatgcgtataaagcgctccgcgagctgcgcggcgcgctggaagcgctcgagtccgacgaggggcagaaggcgcggcgcatggacatcctgcgctatcagatcgaggagctggaggcggcgcagctgcgcgtcggcgagcaggccgagctgacggaaaaacgggacgaaatccgcaacagcgaacgcattctgcgcggtgtaggcgaagcggcggctctgctgcacggagacgaggatacgaacggcgcggtgacggcagtgaccgtcgcggccgacgcgctcgagcaggcggcgcgctatgcgccgtcgctttccgatctggcccagcgcgtccgcgacgcggagtttgcgctttcagatgccgcggccgacgtgtccgactacctcgacagcgcgcagttcgacctatccgcactcgacgaaatggaggagcggctggaggtgatttaccgcctcagcctgaaatacggcgaaaccgaagcggaaatgctcgcgtttctcgaaaaagcgcgcgcggagctttccgacatcgagttttccgatgaaaagcgcgcgctgctcgaggcacagtacgaagagaaaaagcgggaggccgtggcgctcgcaaagcagctttccgcaaaacgccgggcggcctgcgagagcttttcgaaacgcgtgcgcgcagagctcgcagagctcaacatgccgggcgtcgccttttccgtggagcaggcccgcacgccgctcacgggctttggatgcgaccgcattcagttcctcgtctccgccaatgcgggcgaggcgccgaagccgatgtcgaaaatcgcatccggaggtgagctctcacgcatcatgctggcgatcaatacggtgctttccgatatcggcacgacggagacgcagattttcgatgaaatcgacacgggcatcagcggcgaggccgccaacaaggttggcttaaagctgcgcggcgtctcgaaaaacgcgcaggtgatctgcgtaacacatttggcgcagatcgccgccatggcggacaatcacctgtacatcgtaaagcagagcgaaaaggggaaaacctttacagatgtgcgcgtgctggatcacggcgcgcgcgtgcgcgagattgcgcgcatcattggcggcgacgatattacgccgctgaagctcaaaatggcggaggaaatgctgatgcggacggaggtgaaagcgtgagcagcctgcgccggctgtttcccggaatcgccctcacgtgtaaaggcattctgcttttcatgtgcggtgcagccttgatcgcgctgtttgctgtgtcgccggtcatttttgggtgtgtgccgtctgttgtttctgaaaccgacagcggtgccgcctatccggcaggcgccctcgtctaccaccgctacacgccggcagaaacgctggcgccgggcgatgcggcggtcgtatatgacgcggggcggacgacggtctgcacaattttatcgcgcgacgatgcgctgcgcacactgctgaccgaggggcacggcccgatcccttttgagcacgtggagggccgggctgttttctgcgtgccgcttgcgggaaagctggtttcgctcttttccgcacctgcgccttggatcattctagccgcggcggcagccctgctggttgccggtgcatttttgctgccccgctacagctatgcgccgaaatacggcagatcggataaaaaatagccttttcggcacggcctgctcttccgctgtgctctggacaccgcgtctgtgcatatcgaaaatattgccggatcgttttgatccggtttttgaaaaagtatcgaaaaccaacgctttttaagcaaaggcattttaattaagataaagggtgtgattcgattgactgtagagctgacggcggattatctgcggcatgtccggttccggatacggcgcggcaatacatacgacgccggcgaggtggacgcctttatggacgcgctgatcgcagccgtggaggcacgcgcggaaaaagagggcgacgccgcgtatacagcgcgcctcgaggcggtctgcgagatccgcgccgaaatgacggagcaggttatgcgcgtgatgctcgaggctgaaaaaaagatcgcgccgatcctcgctgccggcgaaaactactgattttatacaattcacgccggaattttcgcccaagtatttgacaaccgtacaggttgtgttataatagacttgaaatatcgatatgccgatttgaatatgcgcttgcgaggttacgcttatgaatatagcccacctgaaatacgccgtcgaggtcgaaaaaaccgcatcgattacaagagcggctgaaaacctttttatgggtcagccgaacctgagccgcgggattaaggatctcgaggaaacgctgggcgtgaagatcttcaagcgtacgtcaaagggaattgtcccgacgccgcagggcgaggaatttctcgtgtacgcgaaaagcatcctcgcgcagatcgaggaggtcgaggcgctttacaggccggagaagaacaacaagctgaaattcagcatttccgtgccgcgcgcgagctatatcgtggatgcgttcacgaattttgtacgcgaagcggatatgacgaaggaaatcgaatttacctttaaggaaacgaacgctatgcgcgcgatccgcaatatcgcgcaggagaattacgggctcggcatcgtccggttccaaaccatttttgagcgcttttttgacaatatgctccgcgataaggggatgaagtccgaatttgtatgggagtttgaataccgtcttctgctctcagaaaaggatccgctcgcccataaggcagacctctgcgtcgacgatctttccggctatatggagctgtgccacggcgacccgttcgttccgtcgctcccgatgtccgacatcaaaaaggcggagctgaacgaagatgtgacaaagcgcatctacctttacagccgcggcagccagctggacctgctcagctgcgtaccgaacacatacatgtgggtttcgccgatcgcgccggagcagctccagcgctacggtctcgtgctcaggacgtgcgcgggcagcaagcggcgcatctaccgcgacatcctcgtctcgaagaaggaatataaatataccgcggccgataaggcgttcatcgaccagctccacgcggagcgcgaccgtttggagtcgctttacggccggccctcgacagattcttcctatatcgatcaataaatatcgatatgtaaaaaagactattttaaatcttgtgtgtttatgttaatgtattatcaaagttattagcgaggtggcactgattatggtgaaccgcagcatatcgaagcaaacgctgctcagattgccgctttatttgaattatttaaagcagttcggcgagaaccagcccgagcacatctctgcgacgacgatttctgaggcgcttcgcctcaaccatgtcgttgtccgcaaggatctggcctcggtcagctcggccggcaagccgaaaatcggctataatacggccgatctgattgcagagctcgaggcgtttctgggatacaacgacatggacgacgcgattatcgtcggtgccggaaagctcggcaaggcccttttagcctacaagggctttcgggcgtgcggcatgaatatcgtggcagcctttgacgttgacgaggagctgtacgacgaggatttctacggcaagcgcattttgcccatggataagctgatggatttgtgcgagcggatgcgcgtgcgtatcggcatcattgcggtgccggctgaaaacgcgcaggccatctgtaacttgctgatcgaaagcggggttctcgccatctggaattttgccccggtgcatctggaggtgccggagggcgttctcgtacataacgagaatttggccgcatctctcgcgctgctttcaaagcagcttcgggaagggtttgaggcgcgctgatttgtgcgccggccacatttaaaacggttgctctggcggagcagggcagaggcccgccttccgccttagaatacacttaaaactaactacagaatggagtaggattcaaatgaaagttgttatttgcatcggaagttcatgtcatctcaagggctctcgccagatcgtcgagaagctgcaagcgctcgttcaggagaagaatctcgaggataaggtcgagctcggcggcacattctgcatgggcgactgcgtcaacggcgtcaatgtcacggtggacggcgtaaagcactcggtttcgcctgagacagtcgatgaattcttcaacaaggaagttctcgcgaagatccagtaatttcaaaatgcctgccgcgtgctgcgccggcagatttcagtggggtgattttgttgcttatcacaggtattaagggaaaggccgaggctttggtaaccgaacagaatacggcgcgggcgatgggaagcgggacgctcgaggtttttgcgacgcccgcgatggtcgctttgatggaggccgcggcataccgctcggtagcagaggcgctggagccgggcacgggcacggtcggcacgctgatgaatatccagcacgtttccgcgacgcccgtcggcatgcgggtcacggctgaaagcgagcttgtggaaatcgacggccgccgccttgttttcacggtgaaggccctagacgaagccggcgtgatcggcacgggcacccacgaaagattcattgttgctgatgaaaagttcatggcgaaagccgagaaaaagagaggttaaggggtatgccggattacctgaaactcaaaaagtcaaactgcaagaactgctataaatgtattcgccactgtcccgtgaaatcgatcaagttccaatcggatcaggcgcacatcgtcaaggacgaatgcgtgctctgcgggcagtgctttgtcgtatgtccacagaatgcgaaggagatccgcaacgacgttccgtccgtgcaggctatgctgaacagcggcagccgcgtgatcgtgagccttgcgccgtcctttgtcgcgaattaccccggcgctacgatcgacaccatgaaggcggctcttcaaaagctcggcttcaacgatgtagaggaaacggcggtcggcgcctcgatcgtcaaaaccgaatatgagaaaatcattgctgagcgcaggcagaaggtcatcatttccacctgctgccattcggtcaacaccatgatccagaagtattaccccgaggcgctgccgtatcttgcgccggtgctttcgccgatgcaggcgcactgcaagcgcatcaaggagcaggacccggaggccaagacggtctttatcggcccctgtatctccaaaaaggcggagtgcgacgagagtccgtatgtcgactgcgtcctgacctttgaggagctgaccgcttggctgaacggcgagcaaatcgcggtggagcccggcgaggacaaaaacgatgagagccgcgcgcgcctgttcccgacgacgggcggcattctgcgctcgatgacgtgcgatgattcggattatacatacatggcgatcgacggcctcgaaaactgcatcgccgcgattcaggatattgtcggcggcaatatgggccgctgcttcatcgaaatgagtgcctgcaccggaagctgcatcaacggcccggcaatggaccatgacaaacgcctgccgattcaggatttcattgcggtgaacaagtatgccggcaagcgggacttcaacgttgagcagccggcttccgaggcaattcaccacaacttcgagtttgtcggcctgcaccgccagatgcccggcaccgcggagatcgagtcgatcctgcgcaagatgggcaagacgcgcccggagcatgagctcaactgcggcgcgtgcggctacaactcctgccgcgaaaaggcgatcgcggtctatcagggccgggcggaaatcacgatgtgcctgccttatctgctcggcaaggcggaatccttttccgatacgatcatcaacaattccgccaacggtatttttgttctcaacgaggcgcttgaggtacagcagatcaatgcgacggcgcgcaagctgatgaacatcaaaaacgcgtcggatattatcggcgagccggtcatccgcattctggacccccgcgcgttcctcgacgtcatgcagacgggccgcgcgatccacgatgagcgcgtttacctagccgaatacaaccggtatgtggaccagacgatcctgtacgaccggagctatcatattttgatctgcacgatgcgtgacgtgaccgccgaggtggacgagcgcatgaagaaagagaagatgggccagcagactatcgaggtcacgaaccgcgtgatcgagaagcagatgcgcgtggtacaggaaatcgcgtctctgctcggcgagacgacggcggaaaccaagatagcgcttacgaagttaaaggattcgctgaaagatgaataatctatgtactgatataggcttcatgagcctgaacaagcacggcgagcagctctgcggcgaccatgttgatatcgtgccgcagggggaaaattccaccgttgtcgttctggcggacggcatgggcagcggcgtcaaggcgaatatcctctcgacgctgacctcaaagatcatctccaccatgatggcggagggcatgcaggtggaggactgcgtggagacgatcgcctccacgctgccgatctgcgctgtgcgcggcgtggcgtactccactttcaccatcatccgcatcatcgaaaacgaagaagcggaaatcatccagtacgacaacccgcacgtcgtgctgctgcgcggcggcaaaaacttcgagtatccgcgcgaggagctcgaaatcggcgggaaaacgatctataagacgcgcattccgattcaggaggacgacaccttcatcgcattcagcgacggcgccatccacgcgggcatcggtatgtcgctgaatttcggctgggagcgcaaggacatcatcgactatatggagatgatgtacgacacgagcttcacggccaagacgctcaacacgatgctgctcgacgaatgcaataagctgtacggcggcagcccgggcgacgataccacctcggtggccgttaaggtgcgcgagcgccgtcaggtaaacctgatgatcggcccgccgtcgagcccggacgacctcgaccgcatgcacgacgcattcttcggtatgtctggaaagcgcatcgtgtgcggcggcacgacctccacgctcgcggcgcagcgcctcggcaagccggtgatcgcccagctcgactatctcgacgcggagatcccgccgacggcgaaggtggagggactcgacctcgtcaccgagggtgtcatcacgatgagcaaggtcgttgagtatgccaaggactacctgcatgaaaatgcggcctacagccagtgggcctataagcgcgacggcgcttcgctgattgcgcggatgctgtttgaggaggcgaccgacgtccacttctttgtcggccgcgcgatcaacccggcgcatcagaacccgaacctgccgatcaccttcaatatcaagatgcagcttgtggaaaacctgtgtcaaagtctgaaggaaatgggcaagcgggtcacggtcacgtatttctaaattcccggttcgggcaagaaaggtctgattcaagcatgagaaaatttgataccaagatacagtacttgaaatacaaggtactgcgcgaggttgcgcggtatgggtttgaggataatctcctcgccgcatacgacgagattccgaagctgatcgtcaaggataagccgacgatgcgctgctgtatctataaggagcgcgcgatcgtgcaggagcgcatcaagctcgcaatgggcggcgacaagcacaatccgaatgtcatcgaagttatcgagatcgcctgcgacgagtgcccggtcagcggccatatcgtcaccgaggcgtgccgcggctgccttgcgcaccgctgcgaggacgtgtgccgccgcggcgccatcacgttcgacgagcaccagagagcgcacatcgataaatcaaagtgcgtggaatgcggtcagtgcgcaaaggtctgtccgtacggcgcgatcatgaaccagaagcgcccgtgcgagcgcgcctgcaagatcaaggcgatcagcatgagcagtgaggagcaccgcgcagcacacatcgacaatgagaagtgcatttcctgcggcgcctgcgtttaccagtgcccgttcggcgcaatcgtcgataaatccttcattctcgacgccgtggagcttttgaaaaagagccgcgacaacgaggactacaaggtgtacgccgttgtcgcgccgtcgatctcgagccagttcagctacgcaaaacttggtcaggtgatcaccggtatccagcgcctcggcttcttccatgtcatcgaggccgcgctcggcgcggatatggtcgcctatcaggaggcggaggagcttgccgaaaagggattcctcaccagttcctgctgcccggcctttgtgtcctatatcaaaaagagcttcccgactctggcggataagatctcccacaacctctctccggcagccgagatcgcccgctatattaaggagacgacgccggacgcgaaaatcgtctttatcgggccgtgcacggcgaaaaagatggagttcaagtacgagcgcgcggcggagtacatcgactgcacactgacgtttgaggagcttcaggcgctgtttgacagccgcaacatcgatctgacgacgcttccggagggcgtgcttgacaacgcctcttactacggccgtatttttgcccgcagcggcggcctgaccgacgctgttaccgaggcacttcaggagcagggaaacacagatttcaagctcaatgcgattgcatgcgacggcatcgaggcctgccgcacggcactgatgcgcgcgtcaaaaaatgtgctgccgaacaacttcatcgagggcatggcctgcctcggcggctgcatcggcggcgcaggctgcctgacgcacggtgataagaataaggcggacgtcgataagtacgggcgcgaggcgatggaaaaatccattgtcgatgcgatctcggtcacggacgtcggcccgaatcccgccgtaaaaccgtaatatttcgctgtattggattcggtctgtaaagctgcaggccgaatctgtgcatattggggagaatgccccctgtaaaaaattcaccttacattttggagaggatgattcaagtgaaagccgcttattttctcggaaacaaaacctttgaagtgcgcgaacagccgactccgaaggcacagccgggcacggtcgtcatcaaaaactacgcctgcggcgtctgcggcacggacgtgcacatctaccacggagaatccggcagcgcagaggtacatccgccggtcgtgctcggacacgagtacgccggcgtcgtcgcggaggtaggcgccggcgtcgaggatctgaagatcggcgaccatgtgacggttgaccccaacatttactgcggaacctgcggcgcgtgccgcaacggcaaaaagcagttgtgcagccacatggaggccgtcggcgtcacaatggacggcggctttgcggaatacagcgttgtgccggccgcgcaggcgctgcgccttgagcccgatgtgccgctggaatacggcgcaatgagcgaaccgcttgcctgctgtatccacggcatcgaccgcgcggagatcaaggtcggcgatacggtatgcgtggtcggcggcggcgcgatcggcctactgatcgtccagcttgcgcggctttccggcgcggcgaaggtcgtgctcagcgagccgaacgctgtccggcgcgaaaaggcactccagctcggcgccgatctctgcatcgatccgcttatggacggcagcacggagcagctcctcgaatttaccggcggagagggtgcggacatcgtgatcgaatgcgccggcaaccatgcggcggtagaaagcgctttccgctttgcaaagcgcggcgcgacgatcctgctgttcagcgtgccggccgtcagcgcgacgtatgcggtgccgctcttcgacgtatatcagaaggagctgacgatccgcggcacgtttgtcaacccggatacgcatcagcgcgccgttgcactgatcaacagcgggcggatccagattgcgccgatcatcacgcataccttctcgctcgaggagctgccggaggccattgcagcgcagatgggcgcagaggcgatcaaggtgattgtcaaggcataggtttgtgaaaaacgagcttattttttaccaaaacttaaccggttcgtgtgatttttcccgtggatatgcagatttttttgctttccattgtacttttccgaaaaacgcagtataataaaatgcaatcaaactagcagcaatgcagcagcgggggatacaacatgaacgcaaatttttgcagtgatcgggtaaacctgaccatgctgacggatttctacgaaatcacgatggcgaacggttattttgcaagcggctttaaggatacgatcggttatttcgatatgtttttccgaaaggtgccggacggcggcggctttgccatcatggccggcgtcgagcagctcgtcgattatctgaaggacctttcctttacggaggaggacatccagtatttgcgctcgaagcagatcttccgcgaggaatttctcgagtatctgcgcggctttaagtttgtgtgcgacgtctgggcggtgccggagggtacgccgattttcccgggtgagccgattgtgacggttcgcggcccggtcattcaggcgcagttcatcgaaacgatgattttgctgtgcatcaaccaccagagcctgatcgcgacaaagacaaaccgcatcgtgcgcgcggcaaacggacgcgcggtcatggagtttggctcccgccgcgcgcagggcttcgacggcgcggtgtacggcgcgcgcgccgcatacatcggcggctgtgtcggcacggcctgcacgatcagcgaccgccgcttcggcgtgccggcgctcggcacgatggcccacagctgggtacagctttttgacagcgaatatgaggcgttcaaggcctatgcggcagagtatccgcagaactgcacactgctcgtcgatacctacaacgtgcttaaatccggcgtgccgaatgcgatccgcgttttcaacgaggtgctggtgccgcagggctaccgtccggcgggcatccgcatcgacagcggcgacatcacctatctttcccgcaaggcaagaaagatgctggacgacgcgggctttgaggactgcaagatctgcgcctcgaattccctcgacgaatacatcatccgcgacatgctcgtgcagggcgcaaaggttgactccttcggcgttggcgagcgcctgatcacctcctcgagcgagccggttttcggcggcgtttacaagctcgcggcggtcgagcgggaggacggcacgctgattccgaagatcaagatcagcgagaacgtcacgaagatcacgacgccgtgcttcaaggaggtctggcgcattttcgaccgcgagactgacaaggcgatcgcggacgtaatcacgctgaacgacgaggtcatcgatgacgaaaagccgtacaccatttttgacccgaaccacacgtggaagcgcaagacggtggagaatttccgcgcggtgcggctgcgcacccagctctttaaaaacggcgaatgcctctatcagccgcgcgcgctcagcgcggtccgcgcacactgtctcgcgcaggtcgacacgctgtgggaggaggtcacgcgctttgagaatccacacagctattatgtggatctctctcagaagctctgggatgaaaagaaccgcctgctctcccagaacgaatactaatttgatattttgcgagtaagccggacagccgcgggtgcatgccgaaaggccgcatctgaggaaagtccgagctccacagggcgagaataacggctaacggccgccgggggcgaccccagggaaagtgcaacagagagataccgcccgcttctgcgggtaagggtggaaaggtgcggtaagagcgcaccggcgcgcaggagactgcgcggccatgtaaaccctattcggagcaacaccgtggagaaacacaggcgccggcccggcgcgtttcgaggaggtggcttgagctgcatggcaacatgcagtcgagaaagatggttgtccaagacagaactcggcttataggcttagtcgcaaactataacggcagcgtcgtttcggcgccgccgttttttatttcggcggacacaaaatgccatgcaggcataggatgaaatacacgcggcagggcatatactgtttttgtacaagccgcactgtataaagaaacggcttccattttgagcttgaggcttgacagcggaagaaactgtgtgctataatcaattcggttagataaagctaactggattgatttacagaattttttctttgcgaaacggcataataggcatgaggccttggcgcctctatcgcacggtatgaaagagaggaacaggtgaggcaaatgcaaaccgtatcctatgggctggccgccgcggcggtcaccgccggggttctggctttctgcatcggtgtaaaggtgttctgccgaaaactgatccgccgtgaagcgatccggaggcatcgcacaggcgattcccgagagtgaccgacgacgtgctttacaccgcccattgcaggtccgctttgaaattcagacggcaaacaagtgaaaaacagctcgatgcgcgcaaattgccgtcgagctgttttcgctgataaactggccttaaaagacattttaccttttttcgttgccgggtcaatgcggcccgagcgaaggcttacaggatattttccagcgtgacgcgctcggtctttaaaatatgctccgtaacggtctgcaccagccggcattccgagcgcgcaagagatatttcatcctgctcgatgtaatagggcagaattgcgaatacgctttcaagcgggtcaaggtgcgcgtgctggaggaaaaggcagagctgcccgtggattgactcccattccgcgagaaaatcctcgctgatttccagtgcccgctccttttcaccgtcggccagcaaggtgtcgatttccgccataacgcctgcgatccgctcggtctgccgttccgtcataacgcggccgaacacgcagatgccgagcacaacggcggccagcacggccgcggcggcaatcctcttcatgcagaagcctccttttcagaaccttttccctttttcacaagcgtgtatttcccggtatcgttgacggtgaggataaagacctcatccagagcggtcttttcctttttcagcgttttttccacccagtcgccgtccttgccgaaaagccggagagaggcgtcggagagctgtccgtcgctcacgacgacaacctccagcccgccgtcctgtggctcgatgccggcgtccacagggcgcaggtaatcgacggcggcctttttcacgacgctcagcgtgccgtttgtctccacgatggcatacgcgatgtcgccgagggcaaacacgtccttctggcgaagctgctcgaaaagatcctcgatactcagccgaagctcacgcatgttctcctgaaggatctgcccgtcccgtataatgacgaccggcttgccgcagatcgcacggcgcactttgctgcttttcagcatgacgtaggagagaaagacctcgagcgcgatcaggacgaaaatcggaatgatcccgctgaaaagcggctggccgctgtcctgcatcgggatgacggcgagatcggaaatcagcatggtgacgacaagctcgctcgtttgcagctggctgatctgccgcttgcccatgatgcggacagcagcgatgatggcgagatagaggatgattgtacgcacgagagagataaacattttccgcattcctttcccggaggattcaggcgtattatgcgcgaaaccatgtataaaatacagctttgcgcaaattctaccggtaggaacgccgccgtgcaaggcacgcggcagaaaggaatgtggattcctatggtaaacatctccgaacagctttcggaaaacacagattatatacaggggctttttaagaacgcgatggattttatcctgcgtgaatttaagatcgacggcatttccgctgcgctgctcgcgatcgaaggactcgtcaataaacagcagatcatgctgggtgttctgaacccgatcatgcgtgccgcggttttgcagacagatggtaaggcgaaaatgacttatatccagcacaatgtgctcggcgccgtagaccaaattgaactgcatacagtggacgacattgtctcgcggctgatgaatggcttttccattctgcttgtggacggatgcagctacgggcttgctttcggcacgcagggctttgaaaagcgcagcgtcagcgagccggacagcgaagtcatgcagcgcggttcacgcgagggatttgtcgaaacgtacatcatcaatatgtctatggtccgccggcgcatgaaaacgccggcactcaaattcgagccgatcgtgatcggtgaggaaagccgtacaccggccgcgctctgctatctcgatacaatcgtagatcccgatattttggccgaagtgaaaaagcggctcaaaagctgcaaccttaaagacgtgctggcagccggatacctgacgagctatctcgagcgcccctcgattttcgagagcgtcggcctgacggaacggccggacacactgtgcggaaaactgcacgagggccggatcggcatcctgattgacggcacgccgacggcggtctacgtgccgtatttgtttgtggaaaactttcagactgtggatgactacgccaaccgcccgttttacgccacctttatccgctggctgaaatacatcgctttttttctcgcgatctttctgcccgggatctatgtcggcgttgcgacacacaatccggagcttctcccggaaacgctgctgctcaaggtcgcggaggcggagagtcagacgccgttcccggtcatgctcgaggcgatcttgctctacttcatgtacgaactgatgcgcgaggccggcctgcgcgtgccaaaatcgctgagcggctccgtcagcatcgtcggcggccttgtaatcggcgaaacggcggtttcggccggtcttgtcagcgcgccctcgctcgtcgtcattgcgatgacggtgatcacgggctatgtgatcccgaagctctacgagcagatggcggttctgcggcttgtttttattgtcgtcggcggtatctggggcgtgtggggcattttggtcggcctgaccttcattatcttcaacctctgtggaaaaagcagctttaaggtaccctttatggcgccggtcgcgccgttccgcttacacgccatgcgcgacgtcgcgatccgtgcgggctggaaacggctcgcggccaaaaataatccggtgcagaacatgccgggcgcagggaagggggaaaagcggttttgaagccaacgacaaagatcagcgcgtttcaattctactttatgttgtttctttcccgcgtcatcatcagcataacgatcaattcccagacgctcggcgaaaagaattttctcgacaatattttttcctcattgctgctgtttgtggggctgttcattttcgtgctgccgcttttttccttgaataagcgctatccggatttgtcgctgcccgcgattgccgaggagcggatgggcggcttcggttttggggtttccgctgtatacggcgtttattttttcatcatgaacacctttagcctctcgatgtttctggcgctgcttttgaatacgctggacccggcggcctccaagtggtcgatcgcgatcattttgaccgggatcgcactgtacggcgcggtaaagggaatcgagacaatctcccgcgcttcgatctgcattttcgtgcttttcatcctcggcatgggggcgatcttcatcgcgctcgcgccgaatgtcacgctccggtatatggagccgcttttttacgacggattcgacgatgtgctgcgcggctttttcgtttttacggcgcgctgtacgtcgcttgcggaatttgcggtgctgatgccgtttgtgcaggggcggaaaaggctgggcttcgccgtgtgcagcggcggcgttacggcgttcctctctattttgctgttcttcatcgtttcctgtctcggcgaatacgcgtacttgcagatctttccggcttatacgcttgccgccatgtcggagatcgccggcatccagcggcttgatgcccttttcatcgggctgtgcatgatgacgcttgtgatccgcattgcctgcggactgttcgccgtctccgagtgcatttcccgcatcgtgaagccgcgcgtgcgcacggcagtgctatccgctttgtccgccgtgagcgttctgttcgcgctctgggtcacggaggacgcgcgccgggccggcatgctgtttaaaaccgagtatctgctgccgcttacggtgctgaccggcgcggtgctgccggccgccgtctgggcagtcgatcatttcaagaaggagcgaaagccaagatgaaaaaatatgtgactgtgcttcttgccgcgctgcttctcgccgtctcctctgccggctgtgcgccggagctttacgagcgcgcgctgatcagcgccgtcggcgtggacgagaccgaagccgggtgccgcgtcacagtacgcgccgcgctccccgcggacgacgggcaggaaatcagcctttccggggaggggcgcaccgtgccggaagccttgaatgaaatcgcgcgcacaaccgggcagcagccgctttattcccacaacacgctcgtggttttcggcatggactgcgccaaaagcgggcttgcggcctacctcgattttttcatccgacactatgattcacgccccacggtcaaggtgttcctctcggaaacgactgcggaggacatcctgcgcatcgacgtggaggatgaagcgccgcgcgccgccgaaatcgcggagctcacaaaaggcgccgtctacagcgggctttcggcagacgtcaatctgatcggtctgatcaacggaacgtatggggagggtgcctccgccgttgttccggtactccgccgaagcgacagcattgagccggccggaacagcgcttctgcgcgggctgactttgcagggtgcgctttctcccgcggcggttcaggggcttctgctcctgcagggcgcgctcgaggccgggcagttcgtcgtttccgaccccgagtgcggcgcggtgacgctcacggtcagcgcgtcggactgccgtgtgcggtttaccggaacagaagaatcccctcgatttgcggtttccgttcaaatcgagggggagatcagtgcgatttccgtcggcaagcatcaaatcgaaaacgatgcgttcccgcggctcgaaagagcatttgcggagcaggcggtcgccgccgtagaggtgtatttgtccggctcggtgtatgaaagcggctgcgacgccgcgggcttcggcggcgcggtgctccgggatgcgcctgaggtctggcgcagggtttcggagaattggcctgcacttctgccaaacgccgtgtttgacgtagaggcgcaggcctccatcgagcgcgtcgaggaggaggatacgccgtacttgtaagcggtttctatccgcatcaaaggtcgattttgactttatagcggttcagccagaggttgatttggagcagataggcacttagctgcgcttcagcggcctgcacgccgaaccacggccggtcggacttttcccgcaaaagcctgcgcgcggcatctgcggagatcaaacggtgaatcggctgctctgggtcgcgcagtacatcggtcagcctttcccggaccgcccgtgtatactgcggagagcacgcggcggaaacagcggcaccctgattgcgctctccgccgaaaacttcatccggcaaaagcccgcggcaggcgtcgtaaaacagcccgtttattctgccctgcggcgcccggatatcgcgcggcgcattgaaaaggtactcaatcagccggtagtccgtgtacggtgtgcgtacttctaagccgctgtacatgctgtaccggtcgaggcattcgagctgtgcccccataaacccatacagactcaaaaaagaattttcgcgaaaacgccggttttccgccgattcgccgcgcagcaccggtgcggcgtcggtcatttcacagcggcgctcccgcacgtaatcctcgacctgtaggtcggcggcgagctccggccgcaggaggcccgcgagaagcaaaggcgccgacgaccacggaaacaggcccgccggatgtcttttgaacagccacggccagcccgcgaaggctgcatcggcgcctatgccgcacagagccgcggcatgccgctttcggatttctcggaaaaggcagagggcagaaccgtcgagtccggccataccgggcagatcccgcgcgataactgcgtcagtcagcgtatccgccatgcgttccgcatcgaaatgcaaagtgtgctgccggatgccgggcaatgcttcggccgcgggcggtgtatcgtcatatgccgaggcatacgcatcgagcggcaaaccaccaccggcggtttgccgcattgccgcaagcgcggcgattgcggcggaagcggtgccgccggaaaaggcggcggccagcggcacggcgccgtcaagctgacgcgacgcaatgtcctcgagcaaggcgcgtacacgctgtacggtggcgtcgtaatcctccgtatacgggtgcgcctccagcttgaaatacggccgcggcgaaaagccctcgcggctgaaaaccgcggtatggccgggaagcagctccttgatgcttttatacacgccgcatccgggcgtgcgcgccggtccgatgccgaagatctcacagattccggtgcggcccagccgtggacgcacacccggatattcaaacagggccttgatttccgaggcgaaaacgagccggccgcccgagaatgtgtaaaagagcggttttgcgccgaaacggtctcggcacagcaggaggctttccctctgcacgtcatccacggcaaaggcaaagacgccgttcattctttccgcgcaggccgggccgaagcacaggtagcttttgagtgcgatctccgcgtcgcagtgcgtttcaaggctgcagccgcgcgacgaaagggcggtccgcagctcatctgcattgcagagctcgccgtcccacacgattgtggccgtgcggccgttttccgtacaggtcatcggctgcgcgccatactcggcgcccggcacagagcgctgtacatgcgcgaccgcacagcgtgacgaaacgtgcgcgccgcggccgtcggggccacggtgcgagagccgctgggccatacgccgcgcaagcgccatccacaggtatttttcatcggtcagggattcctcagcatcaaaaaagccggcaaagccgctcattaaaatcatccttccgttttggggaaaacgggaaatccctatgtatcgcggcaaaaaaaacgcgcataaaacgatccccgttcctttcagaatagatcattctatgcgcggccaaatgcgtttatgcttcggatttgctctgcttcttcgatttttcagcgctctttctctccttgctgccggattccgcatcctccgagagcgccatcaggatgcgttcggaaacggcgcgccgggcgttggcctccgccgcaagccgaagcgccagtgcgcggagctgcgtttcatccgtctcgtcctgtaataaagccgccgtttcgtgcagcgcgctgtcctgcgcggcagcaaaggccgcgtaaagctgttcggcagtttcgccgccggaaaacagcaccgaaatatcctgaattgagagcacctgcttgagcaggctcgtcatcatcagcttgacgaggtgctcgcgcatgtatttcttgtgcaccgggtgctccacaacaccgttttttacataattgttgaccatgctgctcgtcaaaaggctctgcttctcatcgcgctcaaacagcgcgagcgcctcgcccgtaaccatcgtgacctgatccatgtaaagcgggatgccgggaagctgttcccatgccggcagcgcatagccttctgccgccgcagcccatgcggccattcctgttttcttgtctcccattttcgatacagctccttttcgttttcataaacagtatacgtcattttaaaaggtatttcaagatttttatgtgttcgattgctatttgcggcggattattgtaaaatagaaagcgaacgaaacagaaaggcagttttcaccttatggataaatctgaaattctcgcgcttcgccgcgcggtgctcgaaaaagaattctcccgcatgaacgaccggcagcggcaggctgtcttttcgatcggcgggccgctgctgatccttgccggagccggaagcggaaagacgactgtgctgatcaaccgcattgcgaacatcctgcgctacggaaacgcttacaacagcacgttcattcaggacgagctggacgaggaagatctcgcggcgtgccgcgcctatctcgacggcggcgaaccgctgcccgaggagacacgccgtcacctgagcgtttcggcctgcttgccgtggaaaatcatggcgatcacctttacaaataaggcggcgggggagctcaaggaccgtctttgcgcgatgctcggcgccgagggcaacgacatctgggcgtctacctttcactcgacctgcgcgcgtattctgcgccgggacggcgagcgcctcggctattcctcgcactttacaatctacgacaccgacgaccagcgccggctgatgaaaaatatcctgaaggagctggacgtttccgagaaaaacatgccgcccaaggccgtgctgaacgagatctcccgtgcgaaggattctcttatcacgccggaggagtatgtaaaaacggcgggcgatgatttccgcatgaagatcgtctcccgcgcctacaagatctaccagcagcgcctgcgcaacgcggacgcgatggatttcgacgacctgatctgcaagaccgtggagctgttccgcgcctgtccggacgtgctcgaatactaccagaaccggtttaagtatttgatggtagacgaatatcaggatacgaaccacgcgcagtacactttcgtgcgcctgctcgcggaaaagcaccagaacctctgtgtggtcggcgacgacgaccagagcatctacaagttccgcggcgcgacgatcgagaatatcctgagcttcgaaaacacgttccagaacgcgcaggtcatccgcttggagcagaactaccgctcaacgcagaacattctggatgccgcaaacgccgtcatcgagaacaacacggagcgcaagggcaaaacgctttggacgcagaacggaagcggcgcggaaatccacctgcatacggccgaaaatgaaatggacgaggccgagcgcatcgcgaagatcattctggacggcgtagcggccgggcgcagattttcggactacgcggttttgtaccgcatgaattcgcagtcgatgatgttcgagcgcaatttcgcaaaatccggcattccgcaccgcatcatcggcggcacgcgcttctatgagcgccgcgagatccgcgagatgatcgcctacctcagcgtgatcagcaacccgagcgacgaaatgcgcctgcgccggatcattaacaccccgaagcgcggcatcggcgaccgttcggtggaaatcgccgcacagatcggccagcagacgggcgagacgctgttcgaggttgtcttgcacgccgacgaatacccggcgctcgcgcgcccatctaaaaaaatgaagctcttcggcgcacagctccgcgggctgatcgagctgaacgaagacccggaggtctcgatcggcgagctgtacgacgagatggtcgagcgtatcggctacatcgaatttctcaaaaccgacgacccggaaagtgcggaggaccgcgagggcaacgtgcacgaacttgcctcgaacatccgccgctacgaggaggagaaccctgaaagcacgctggcggatttcctcgaggaggtctcgctgatcacggacatcgacaactatgacaacgaggccgattccgtcgtgctgatgacgatccactcggcgaaggggctcgaatttcccgtggttttcctgccgggcatggaggagaacattttcccgggcatggcgagcatctacaatccgtccgaagtagaggaggagcgccgcctcgcctacgtcgcaatcacgcgcgccaaggaggagctctacatattcaacgctgaatcgcgcatgatttttggtatgacgagccgcaaccggctctcgcggtttgcggaggagattccggaatcgctcgtcgaacacacgcgctcgcgcgagtacagcgtgcgcccgaccgtgatgccgagtttctccggcgcaaagcccttcggcgcgccgaagtcggcctctgtcgccgaggccggcggctttacgccgaagccgcgggtcacaccggcgccggctggtacataccgcgtcggcgacacggttttccacaaggcgttcggcaccggtatcatcgtttctgcaacgccaatggccaacgacacgctgctggaggtcgctttcgacaaggtgggtacgaagaagctctttgcgaattttgcccgcctgacaaaggcatgatccgcggcggaaaacaaaccctataaaagcccggcggcgcggacagtcctatccgcaaaacaaccgccgctccggaagctgtaaggcacagtgccggagacacgatcccgcagggaaaaacaggtatagaatgatggaagatgacaaacacgaaacaaagaaaaatttcacagtacgctatctgacaaccgacgacctcgagcagtacgatacgcttctgcggtactcctttcaggtgacggagcaggatctgttcgacacgggctggcgcagcgacgaaatgcagcagtcaaagttcccggtgctggagcgcgccgacgtactcggctgcttcgacggcgattacctcgtatcgcaggttgccgtgtacccgctgcgggctaatatttacggcgttttctatcccatcggcttcgtgacgagcgtctgcacctacccggaatacaccggaaacggcatcatgaagcgcttgatgtaccagagcctcgtgcacatgcgcgagcgccggcagccctttgccatgctgttcccgtactccatcccgctctaccgaaagctggggtgggaaatcatttccgacaagatcacctacacggtaaaggaccggcagatgccctctaatgcggaggcgccgggctttgtgcgccgcgtcgattgggacaacgaagattttatgcgcctgcacgagcgcttcgcgagcgtcacgcacggctgtctgttccggaacagtctggcgtgggaagaatactggcgctgggataaggacgacacggtcgtcgcgatttactacgacgtgcagaatacgccgagcggctatatggtgtacctcatcaaagacgacatcatgtacatcaaggagatgatctacctgaatcgcgaggcgcaggagggcctgtgggagtacatccgcgcgcacgattcaatgatcgacgaggtgcacggcaactcctattacaacgagccgatcgccttcgacatggacgacggcgacatccgcgagatgatccgtccgtatatcatgggccgcatcgtcgacgtcgagcagttcctgcttttgtaccggtgcgatccgcgcgaaaagggcgtttgcttcgcactggaaatcacagatagctttctgccgtggaataaccgcacagtcagcgtccgtttcgaaaaggggcggtgcagcctcacggaggaaacggcgcagtaccgcgtcgggctttccatttccacgctctccacactgctgctcggctataagacggcggcaaagctgtatcgcttggggcgcatcgacgccgacgaggccgccgtcgcccgcctcgacaacgctctcctgcacgaggcgccgtatatttcggactatatctgaccggatcagcacttggcggcgcacacaaagcggaggtctggcgtacagcgctgccggataccggtgcggaaatcatgcgcaggcaatccggccgtctgtgccaagatataaacaggaagccgcgcgcccacaatcggacgcacggcttttgctttttatgtcggggttactttttgcgcaggtttacttattgcagccgcatccgcagttgcagtcgccggccttcggcgggaagaattcatcggtcgggaaatcgatcttgcggaagagctcgcaggggttgtcgctcgaggtgacgcattctttctccggcacacagaaatcgaatgccggaatcagcatctgcacattgcgcacgatctgcacgatcgtaaagaggccgatcgtgacgtacacggtgtttttctgcggtgcggtatcgaatgcgccgccgtagcggtttgcgatacagtccggaatcacgcagcagggctcgcagccgcaggcgcacgagccgcggtcgcagagctttgcggaaagcgcaaccggtcttgcaacctgcacagtcgctttcggaagcatgcggctgcactgcagctcgcagccctcgcaggaatcctcgctcgagaacatcttgacgttgccctcactgccgaacaggatgacctttttgttgaaaatcgcaatgccgttgacgcgctcgctgccgatgatggagccgccgtagaggtcgagcgaaacatcgaagaagaacgtcaggtcgatggaatagtagccgcggttaaaggggatcggctgcatgtcgatgtacacggagatcacatcgacatagcgcacacgcacattggcggcgctgtccaccagcggctgcaccgctgtggggaacaacacacgcatatcctcaaggcagtctttatcgctgcatgaatcatatatgcgcatggcgtcgatgcagacggcttccttgagcgcgggctgtttgttatcggcgcaggaagcgaattcattttcagccatttgataaacctccttcatggtttctcactgtcattttacggtattcgccgtttcttgtgcctgtcccatctttcatgtttcttaattacagggaaagctgcaaatttttggttgtatatttgtccgctctttgttataatagggaagaatgtatagaataaggacagaggaaaatggcactgattgttattgaagggcttgacggcagcggaaaggccacacaggccgggcgcctgctcgcctatgcagaaaagcgcggcggcgcacataagatcacctttcccgactacgattcgccttcttcgtcgctcgtcaaaatgtatctggccggcgcgttcggcagcgatgcagaggctgtaaacgcctacgcggcgagcgccttttacgcggtcgaccgctttgcgagctttcagatcaaatggaagtccgattatcaggcggggaaagccatcatcgctgaccgctacgtgacgtccaacatcgtgtatcagctcagcaagctgccgcgcgctgaatgggacggctatatggcatggctcgaggatttcgaatacgggaagctcggcctgccgcggcccgaccgcgtgctctatctggacgttccgccggagatctcacaggcgctcatgctcaagcgctacgtcggcgacgcctctaaaaaggacatccacgagcgggacttcgactacctgcgccactgccgcgattgtgcgctgtacgctgccggaaagctgggctggacggttttgagctgtgccgcaaacggggcgctgcgcacggaagaggacatacacaacgaaatacttttaaaattggaggatctgctatgatctatgtttttcttgcaaacggctttgaggaaattgaagcgctcgcaccggtcgatattctgcgccgcgcggagctggaggtcaaaacagtcggcgtcggcggcaaaacgatcacagggtcacacggcatcaccgtcacggccgacatagaggagaaggacgtcacaaccgacgacatggagatgatgattttgcccggcggcatgcccggcacgctgaacctcgagaaatcgccgatcgtcacagcctgcgcgaaatactgcgcgggcaacggcgtatatctcgccgctatctgcgcggcgccgagcattctcggccatctcggcctgctcgagggcaaggaggctatctgtttcccgggcttcgagggcgagctgaagggcgcaaaaatttccgaaaagcatgtttgtgtggacggcagcgtgatcaccgcgaaggggatgggcgttgccacacagtttggtctgacgctcgcgggtctgatcgccggcgaggacgccgcagagaagattcacgcagcgatccagtgtgccgactgatcgcggaaaaggctgcgctgcgccgaaaaatgcgcgcaatgcgcgatgcctgcacgaaccgtgcggcatgcgacgagcggcttctatccaacatactggcgcttcaggcatacaaaagcgctgaaagcgtactctgctacgtctcatttggcagtgaagccggcacctgcggcttgctgcggcaggcgctggcagacggaaaaaatgtatttgtgccgcgctgtctgccgggcagccgccggatggaattttatcgtattgacacgttggattcgctcgagcccggtacttttggcattttagagccgcccgcgctttcggaacgccgtttcgcacaatccgacaaggcgatttgctttgtaccggggcttgcctttacacggcatggaggccggctgggctggggaaaaggctattacgatacatttttaagtgaaatgccggtctgtaccatcggcctctgctatgatttccagattttggaggatttgcctgcggatgcgcacgatgagccggtttcttgcatctgtacggataaaagcctttacacctgtactttgagtcaacagacagaacgaaaggatggtttaaaatatgagcgatcacgatgaaaaccgctacgaaccgcgcgagcgcacgggcgaaaccggcgcgccgaacggcaggcattttcaggtaaaacttaccgaggagcagctcagcgcggcgccggttcaggcggaattaaacggcgataccggagaaatcgcgccgcgcgctacagagcgcagcacggcgcgcagcgaacaggtgcgccgtaaggaagcgcgggcacataaaaagcgcaacaaggtaaaggccagaaagaaccggcgtatcttcacgctgacatggctcgccatggtcctcctagtgtccctgatgatcgcttcctacctgatcggaggctccaatgactttctcgctgtcgaccgtatggaatcgaccgtgactgttacggttccgaaggatgtcacggcggacgagctcgccgatatcctctacaagagccatgcgatcgagaagccggagtttttttcgctgtactgtaagctcacgacggatatggactatttttcggagggctcctacgacgtggcgacgaacctcgactacgaggctttgatcaacgaattgcagggcgggccggatctcggcgaggagctagagggtatcaccttcccggagggcctcacgattgagcgcatggccgaaattctcgaggaaaacggactgcacacgaaggacgagatcctcgaggcgtgcaattccattgatttcagcgattatgatttcatctcggcgatctcaaacggagacgagaaatactacaagctcgagggttatctgttccccgacacgtacaatttctttgagaacgaatcggtggaggtgacgctgcgccgcttcctcgacaactttgagaaccgcattcaggaccttaaggccgatattcaggccagcggctacaccatggacgagattatcacgctggcgtcgatcattcaggccgaggccgcaaatacggatgacatgtatatggtttccgctatcctgcacaatcgtctggaaaacggcgaatcccatgacattttctcgctggactgcgactcgacgctgtactacccctacaccgccgacacggtgccggaggattatgtcagccgctactccacctacctcaacaacggcggtgtgagcggtctgccggccggtgcgatttgcagcccgggtctcgacgccatcgacgctgcgattcacccgagcgaggagggcagcgattactattacttctgccacgatgcggacggaaccccatactacgcggcgacggccgaggagcatgaaaacaacctctatgaggcagggcttctctgagctgcgcgttaaagccgttcatttaaattttcgtgccttttcagcgctgcggcctgaaagggcacgttttccgtccgtttatttttggccttgtgccgtcagaaaatatgtaaggggatagggattcagtatggatcagaaccgaaagccggaacttctttctccggcaggcgatctcgagcgccttcagactgcgctcgattacggcgcggacgccgtttatcttgcgggaaaggccttcgggatgcgttccgcaccgtctaattttacaaacgaagagcttcgggagggcgtgcggctcgtgcatgccaaaggcgcaagggtatacgtgacctgcaacacgctgccgcgcagcgcagagcttgctgcactgccggattttctcaccttctgtgaagaaatcggcgtcgacgcatttatcatcaccgatctcggcgtcctcgcgatggcgaagcggtatgcgccgaaggtcgccgtacatatctccacacaggcgggcatcgtgaatttcgaggccgcccgggctttctacgacctcggcgccgagcgggtcgtgctggcccgcgagctctccttttgcgaaattgcagagattcgcgccaagacgccagcggcgctcgaaatcgaggcattcgtccacggcgccatgtgcgtctccttttccggccggtgcctgctttcaaactacctgaccggccgcgacgccaaccgcggcgactgcgcgcagccctgccgctgggattactatctggtcgagcgcacgcgcccggagcagccttttgttctgcggcaggaggacaagacctcctacgttctgaacgcaaaggacatgtgcatgatcgagcatataccggagctgatccgctgcggcatatcgagctttaagatcgagggccgcgcgaagtcggcctattacgtggcctgcatcacaaacgcgtaccggcacgctgtcgacgctgttctggaaggcagaccgcttccgccgtgggtcattgcggagaccgacaaaatcagccaccgcgtttacagtgaagtgataaaataatggtagacacaaaagtgcctaccattatttttatgctattatagacatggaggtggcaatatggctggtaaatacacgatgcgaagcaaagaagaaaagttagctattgtaaagaggaatttagcaggagaaacttcaaggtcgctcgaaagagaaacaggatgcagtcatcggttaatacaagagtggaccagaaagtatctagcagaaggtgaagccgggctggaagttaagaagaaacccgggaatcctttatctcgttatgagcgccggaaggaactgacctacgaggagcagctgcaataccagatcgaactgctgaagcgagagctggttaagaaagaggcggaggtacttcgtttaaaaaaacggaacgaacgaaaagggggcgatgcccgaaaaagatgatccgagagatgtatgctgagattcaaaagcagacagacaaacattctgtcagcgaactttgcgaaatctacggtgtttctcgcagcggctactacaagtggttgaagcgagcaggacagttaaaccggtatgagaaaacacataaaatactggatagttatgtcctggacatccattcccaccacccaatgatgggataccgccagatcagggataagctgtaccttgaattcggttggatcgtcagtgatcctactgtttggaagtcaatgaagcgactgagaattcacggatacaccaggcgcaggaaagctgcggccacaggaaccaacttagaacacatccgctatgccaacgtactgaacagaaaattcaaagcagagaagccgatgcagaagattgtgacggatgttacttatatcaaacataacggcaagtggtattatcttgcaggctatttggatctgttcaacaacgagattctggaatgggaactcagcgatacttttgacaatttcctcgttatgaagccggcagagcgccttctgaaaagaaaaatgagcaccgaacaccaaatccttttgcacagcgaccaaggtgtccagtactcatccgcaggttattgtaacctgcttaaagaatacaatgtaattcaaagtatgtcaagggccggaaaccctcgcgataacgcagttatggaaagcttttgggggcgattcaaggacacgctgcgcaagcacttccgttactgggaatgtgatgatctgagatctaccattgagcaggcaatctactatttcaacaatgaacgacccgtccgcaaactaaaaggaaaaccaccagtcccgtatagaacagaactggtggcataagaaattttatgtctactaactattgactacttcacgtttacagcacgggcttttacagcggaaatgagccgggtcagacgccggagagcggcggctacatccgaaactgggacatcgccgccgtctgtatcggagaggagcacggcctcgtccagctttcccagcgcaaccgctttttccgcggcgaggcggtcagtgtgctggagcccggcacagagccgtatgcggtgacgctcgacacactgtacaatgaggcgatggagccgatcgaatccgcaccgcatgcaaccatgaccgtttacctcaaaacggacaggaaaattaagccgggggcttttctccgcgtccgccgcggatgattttaaggcgccgatacgcacattgcacagcagggcaaagcctgtattaaaataagaactgcattgcataacacctctcagaccgggccatactcggcatggaggtgtttttctatgtctatccgccgaatgataacggcctatgctttcattatgttttttgtcgtgatcgcaattctcggcaccgcatccgcgtcgcttggcggcggcatgtatacggaggtggtcggcaggcagagcacctacacgctgtccgtcgcaacggcgcgtggcacaatctacgaccggaacggcaagccgctgaccaatgcggaggaaaagtacattgcggctgttgtgccgaatgtggaatctgtctcccgcctgaatgcagcggccggccgtgaaaggcgggaggagctccgcgtcgcgctcgaaaacggcaagccgtttctgatcgaggtaaatacgccggtccatgcggacggcatcgagaccttccgggtttataaccgctacgcagagcaccagcctgccgcaaatatcatcggctacctcgaaaacggagagaccggcgccgacggcatcgaaaagagctttgattccatgcttgcggcgagcaatgggacaatcgacgtcacgttcacgatcgacgcgctcggcaatgcgatctccggcgcagagctcctcgtcgacaacacctatcagatcgcggacggcggcgtcgtgctgacccttgaccgggatatacagctcgcgctggaaaaggcgtgcgcatccatcgagaagggggcagccgtcgtgctggactgcaagaccggagatattctcgcgtgcgcgagcttcccggctgtcgaccccaacaatctggatgcatgcctcgaggatgcggacgctccctttctgaacagggccctcagcgcttacgcgcccggctcggttttcaagctctttgtggcggccgcggcgctggaggccggcgcggactaccgcgaaagttacgaatgcacgggaagcatcgaggtggacggcatggaattcgcctgttacgacgggaaagcgcacggggaggtcaatatgcacacggcgctgcgcaaatcgtgcaacggctatttcgtcgagctgatggaaaagctcgagccggaccgcgtgctccgcatggttcactcccttggatttgaaaacccgctttcgctggcaccggggctgtcctgtacggccgggacgctctcctcggcgcagacgctgcaaaacgcgcgggccagagcaaatttctccttcgggcagggggaaaccaccgtgtcgcccgtacagcttgccgcggctgtcaacgcgatcgcggccggcggcatctatacgcccccgcggctggtttacggcacagccgatgcgaacctagaaattgaaaaagaagatttgaacgagggctataaggtcatggagcccacaaccgccaaccgcctgcgcgcgtacatggaaagcacggcgcgctacggaacgggaatcagcggcgcgccgcagaactgtacatctggcatcaagaccggcaccgcgcagaccggcgtttatgcggaaagcggcgatgaaatcctgaatcactggtacgccggctatatctgcgacagcgacgatgcgccggcctataccatcgttattttagaggagacggccggtgaaagccacacggccgacgcatttcaaaaaacaggcgaggcgctcgtcgattttatttgacaagcgcctaaaaaagcattatactatagttgaaaaagcgagagggtattccgctcctttttccatgttacatgttttataaaagcgatacaggcacagagcagatatgcgcggcgctccgaacagagaagggatccatggctggaagatccccggcaggcaaaacgcatgagccagctcgagcagcgtgccgcgcggcgaggagccgcgccgttttccgcgttaaggagagcaaaagagagaggccagcggcgacgctgcgcatctaatttgggtggtaccacggaagccttccgtcccattgcggacggaggctttttatttttttgcaggagcaagggagaaatggatatggatttagactattgcctttccgagctgaaggcgcttctttcgatcgactcgccctccggctttacagacagagcggcagagcatctgatgcaggcgctggagacgctcggctatcagccgaaaaagacgcgcaagggcggcgtgctctgctgcctcggcggcgagggagacggcctgcttttaatggcgcatgtcgatacgctcggcggcatcgtctcgagcatcaagccgaacggccggctgcagatctcgccggtcggcggcctgcgcgcggagaactgcgaggcggaaaactgccgggtatactcgcgcttttccggtacatatacgggtacgctgcaaattgcgaacgcctctgtgcacgtgaacgacgactacgccggtgcaaagcgcacgttccgcgactcggagatcgtgctcgatgagaatgtccgcaccgcggaggccgtccgcgcgctcggcatcgaggccggcgactttgtctgctttgacccgcgcacgacgatcaccgaaagcggttatatcaagagccgctttctcgacgataagctcagcgcggctattctgctcgcctacgccaagctgctgcgcgacgagaaaaagacgccgaagcgcaaaatctacgtgcatttcacagtttacgaggaggtcgggcacggcgccgccgcctctgtgccggatgacgtcaccgaggtgctcagtgtagacatgggctgcgtcggcgacggcgtgacctgcaccgagcatgaggtttcaatctgcgccaaggattccggcggcccgtacgactacggcgtcacaacggcgctcgtgcaggcggcgctgaaggcaggcgcaaagtatgccgtcgacgtttacccgcactacggctcagacgccgaggcctcgctcagcgccggctacgacgtgcgccacgggctgatcggcgcgggcgtctacgcctcgcacggctacgagcgcgcgcatatcgacggcgtgcagaatacacttaaacttctcgcagcgtatacgctgtaaaatcttaaaggaatggtgaaacacaatgcagtggacaggtttaaacgagctcagagaaaaatatctctctttctttgagtccaagggacatcttcgtctgccgagcttcccgctggttccgaaggacgacaacagcctccttctgatcaactccggcatggccccgatgaagaagtatttcaccggcgaggtcacgccgccgagaaagcgcgtgacgacatgtcagaaatgcatccgcacgccggatattgagcgcgtgggcatcacggctcgccacggcacgtattttgagatgctcggcaacttttcgttcggcgactactttaagcgcgaggcaacggcctgggcatgggagttcttcaccgaggttctcgagatgccgaaagagctgctctacgtctcgatctatgaggacgacgacgaggcgtttgagatctggaccaaacagaacggcgtagatccgtcgcacatggtgcggctcggcaaggaggataatttctgggagcatggctccggcccctgcggcccgtgctcggagatctatttcgaccgcggcgaaaagtacggctgcggcaagccgacctgcggcgttggctgcgactgcgaccgcttcgtcgaggtgtggaacctcgttttcacacagtttgagaacgacggccacaacaactacacgccgctcgaccacccgaacatcgacaccggcatgggcctcgagcgcctcgcctgcgtcatgcagggcgtggataatctgttcctcgtcgacaccgtgcagaatatcatgaggcacatttcgcggatcgccggtgtcgaatacggtgcaggcgaaaagagcgatatttcactgcgcgtcatcacagaccacatccgcagcacctcgtttatgatcagcgacggcgtcatgccctccaacgaaggccgcggctacgtgctgcgccgcctgctgcgccgcgcggcgcgccacggcagactcctcggcatcaaccgcccgttcctttcggaggttgtggacacggtcattcaggaaaacgaaaaagcctatccggagctgcgcgaaaagagcgcgatgatcaagaaggtcatttcctttgaggaggagagtttctacaagacaatcgacaaggggttcgcgctgctcaacggcattctggatcggaccgacgccacgatcctttccggcgaggacgcatttttgctcagcgatacgttcggcttcccgatcgatctgacaaaggagatccttgcggaaaagggtatggcggtcgacgaagagcgtttccgcgcgctggtgctcaagcagcgtgagactgcgcgtgccagccggaaaaatgccggtgccgacgcttgggcgggcgatgccgacgtactggaaggccttgaaaaaaccgcgtttgccggttacacaaagctgagcacggagacagcagtcaccgcgcttgtcaaagacggcgcccgtgcagaaagcgcggaggccggagacgagatcgtgctcacgctggcagaaacgccgttctacgcggaaagcggcggacagatcggcgacagcggcgtgatccgaacagattcctgcacaatccgtgtgctggataccacaaaaaatgcctctggcgtttacgtgcataaggccgttgtagaggaaggcttcgtgcgcgagggcgatgccgcagaggcttctgtcgatgccgaacggcgcttcgcgatcatgcgcaaccacacggcggcgcatctgctgcaagcggcactgcgcaccgtactcggcgaccatgtcgagcaagcgggccagctcgtcaatgaacaggccgtgcgctttgacttcacgcatttctcggcgctgaccgacgaggagctgctcgccgtggagaagctcgtcaacgaaaaaattctcgagaacatcccggtggaatgccgcgagatgccgatcgaagaggcgaagaagctcggcgcaatggcgctgttcggagagaagtacggcgacgtcgtccgcgttgtctccgccggcgatttctccagagagttctgcggcggcacgcatatggattccaccgcgaagctcggacttttcaagatcgtgagcgagtcctccgttgcagccggtgtacgccgtatcgagggcgtgacgggtacgaatgtactctcgatgatctatgcgacgaaccgcatgctgaaagataccgcgcttgcgatgaaggtcctgaatttcgccgacctgccgatccgcgccggcgtgcttttgcaggagatcaaggaaaaagacaaggaaatcgattccctgcgcgcgcgcatcgcgacgatggatctcggcacaatcctcgataacgcggtcgaggtcaagggcgtcaaaattgcgacggccatgctttccggcaccggcagcgatacgctgcgcacaatgtgcgacatgatccgcgccaacacgaccggcccggtggtcgccgtgatcgccggcattctcgacggcaaggcgacgctcgccgcgacggcgaacaaggaagcacaggcgctcggcgtgaaggccggcgtgttggtcaaggcagtcgcgcagatcaccggcggcaatggcggcggtaagccggacttcgcgatggccggcgtcaaggatcagaccaagatcgacgaggcgctggccgcggtcgagcacatcctgaacgaacagatctgatgtatacaaatctttgcggaaaggaggatattcttgcgcaggctgcggcttttaaagcggaggctgcgcagaataaggcgaaatatggattgtattttctgtaaaattgcagcgggcgaaattccgagcacaaaggtctacgaggacgagcagatgctcgccttccgggatctcgacccgcaggcgcccgtgcacatcctgatgatcccgaaagtgcacatcgcctctgccgacgcgctgacggaggaaaacgcgcaggttgtcgcacacatcttcacggcggcaaagaaaattgccgcgcaggagggactgacgaacggttaccgtatcgtcaacaactgcggcgaggacggcgggcagactgtaaagcacttgcactttcatcttctcggtgggcgcgccatggcatggccgccgggctgattgaatcgctaactgtaaaggaaggaacatttacatgggaaaggtttacaaaatgaccatcgcgggctgcgagcgcgagctgccgatctgcccgatcagcgatacgctggacatcgcgggctttgtcatgttcagcgatgtggaaatcacggagaaaacggcggcggcactgttcgaaaagtgtcccgcgcacgacatcatcatcacggcggaatccaaaggcataccgctcgcctatgaaatggcgcgcatcggctgccgaaattacgtcgtcgcccgcaaggggatcaaggcttacatgacgaacccgatcaaagtcgaggtcaagtctatcacgaccgaccacgtgcaaaccctgtatctctccgaggaggactgcaaaaacctcaagggcaagcgcattttgatcgtggatgacgtcatcagcaccggtgaatcgctcgccgcgctggaggatctcgtcaaggaaatcggcggcaacgtcgttggcaaggcctgtgttctggccgagggcgacgcggcagaccgtacggatatcatttatctcgagccgctcccgcttttcttcaagtaaaccacagaaaaaacatgagaaggactctgcgccggcagggtccttcttctgtatccggcttttcgcataaccgtccgatttggcgcatatactgcgctggggtgatgcggcatgaaaaaatacgcttctgtcaaaatttcctatatcctcacagccttctttttcggcgcgctcgtcttttttctgagctctatcttcggcgcggtgcacgcggtttcctccgccgcggcaaaagcggaggcgcggccgaccatcattctcgatgccgggcacggcggggaagacggcggcgccgtcggcgtcaacggcgtggaggaaaagaccgtcaatctggccgtcgcgctgcacgtgcaggaggcactgcaaagcgccgggtatccggttgttatgatacgcgacactgatacagccgtgggcgatacgacgctttcaaccctgtccgagcgcaagcgctccgacatacagtaccgcacacagcttgtgaatgaaacagaaaactgcattctcgtcagtatccaccaaaatttcttcgaacagagccagtacagcggcgcgcagatgttttattcgccgaataacacgcgcagcgccgatctcgccgaagcgatccgtcatgcggtcgtcgcgcagattcagccggaaaacacacgcgagaacaaacaggcggaaagcgggatctatattttaagccacgtggatgtaccggccgtcatcgtggaatgcggatttatttcgaaccctgaagaggcggagctgctctgcgacagcgcctatcagcagaaaatggccggcgcggtggccgacggcattctttctttcctcgaaacagaataggtctttacaaaacatctgttccatgataaaatgatcgtagatcgctttgcactgcacgcatgattaaaggaatggttgttttatggcattaaaaagcaagaccgtatatatctgctctagctgcggctatgagacggcgaaatgggcggggaagtgccccgattgcggcgaatggaatacgatggaagaatcggtcaaagcgccggccgcggcatcgaggttttctgccgcagcccgcccggcggtgccgctcttgacgcgcccgcagacgatacaggaaatcgattccgacgacgagcatcgctaccacaccgggctttccgagctggaccgtgtgctcggcggcgggcttgtgaagggctcgctggtcttgatcagcggcgatcccggcatcggcaaatcgactatcctcttgcaaatctgcgaatacctcgggcagaacctgcgtattctatacgtttccggcgaggagtctgcgcggcagatcaagctgcgcgcggcccggctcggcgtttcgagccccaatctgcgcattttgtcggaaacagacgtgcagctcgttgtcgaacatatccgcacggaaaagccggatatcgtgatgatcgattcgattcaaacgatgaattttaccgatctgaattcgtcgccgggcagcgtaacacaggtgcgcgagtgcaccaatgcggtgatgcgctgctcaaaagcgctggacatccccgcgattctggtcgggcacgtcaacaaggacggcgcgatcgccggcccgaaggtgcttgagcacatcgtggacgccgtgctttatttcgagggcgaccggcagatgacctaccgtattctgcgcgccgtgaagaaccggtatggctctaccaatgaaatcggtgtgttcgatatgggggaggctggcctgcgccaaatcgagaatccctcgcaggccatgctttccgggcgccccaaaaacgcctccggcacctgtgtcaccgcagtgatggagggcacgcgcccgctgctcgccgaaattcaggggctcgccacaacatccggcttcggtacaccgcgccggatgtccaccggcttcgattacggccggatggcactgatcctcgctgtgctggaaaagcgcgcgggcttttacttttcgaatctcgacgcatacttgaatgtggtcggcggcctgcgcatcgacgagcccgccgtcgatctggctgtcgcgatggcattggtctccagcttaaaggatgcgccaatccgggacgacaccgtcgtgttcggggaaatcggccttgccggcgagctgcgcgctgtcagccacattgaagctcgcgtttccgaggcgttccggctcggctttacgcgctgtgtcctgccgtaccacagtgtcaagaatatggatcgcaagcgtttcgacggcatggagctgatcggcgtgcgcaatgttcgggaggcatttgaagcatgtgtgtgacggaagcctttgtaaaacagccgaatctgccggaagggcgcgtccggctcgccgttgtctccggcgcatacccggaaatttcggaggcattggagcgcaggggagtcacctgtatccaaacagcggcggatccgcgccttcagccgcagatcgcgcaccacgcggacatgcaggtctttcatctgaatgaaaacagaatctttgttctaaaaggaggagcacaggcacttcgcggcaagctcaaaaatgccgggttttccgttgcagaaacagcctcagaaccgaccgcgaaatatcccggcgacgtgctgtgcaacgccctgcaaatcggagacaagctgcttgcaaacctcggcgcgatcgacccgtatatctacagctttgcagaatcgctcgggctaaagacgatccacgtcaatcaggggtacacgcgctgcgcgacggcagtcgtgagcaatcgcgcgatcatcacgatggacagcggcatttacgccgctgcacagttcatgggactcgatgcgctgcatatttccgaacacgggattctgctcaacggctatgattacggcttcatcggcggatgctgcgggctgatcgaccggaatacactggcctttacaggtgcactggattccttgcagagcggcgattatatccgcgcgtttttagcaaagcatgcggttgaggccgtggagctcacgcaaaaccgtatgctcgatattggcggaattcttccgcttaaaatatccgcttgtgatcctgattagaatgccagctttgaaaatcgatcggtgtgcgctgcataaatctgtgcgggcaagtcactacaatatagagatagaggcggaacttgacatcgcggaagaaaacggctataattatacaaaatgattattttgtataatttggaggacaagcgcgctccgcgcgcccgcgctgcccgtcaaatgcctttaaagtcccgcttcgatttaatctgcgcttaacgccgcttgccgcttgagaaaatcggatattgtggacttcgggaattggcgcgtgacagcgttgcggatgtattcgcgtggatcacatagattttaaggagttgaaccccatggctttcaatatctctgatgaaatgccggaaattatcaagcagtacgccctgtattaccgcaatatcaaaggccgcgcacagaaaaccgtcgatgaatactgtatggatctgcgcacatttttccgttttatgaagcgctttcgcggcttggtttccgcagatacgccgcttgaagagatttccgttctggacatcgatctcacatttatcaagacgatttccacgatggatatattcgagttcatgaattttgtcgccgatgagcgcagcaatatgagctcgacgcgccagcgcaaatcctctagcctgaagagttttttttggtatctctccgttcacgagggattgctggtatcaaatccaaccgaaaatctgacgccgcctaaaaaagctaagaagctcccccgttttttatcgctcgaacaaagcatcgaacttttgaatgctgtggacggcccggataaagcccgcgattactgcattctgacgctgtttctgaactgcggcatgcggctttccgagctggtttccatcaatctgagcgacgtcatccacaacaacaatacgctacggatcgtcggcaagggcaataaggagcgcatggtttatctgaacgacgcctgcctcacagcaatcgaagcctatattcgggtgcgcccgaaggatgatgtgcgcgaccggaatgccttgtttttgagcaaccgcggtacgcggatcagccccaaaaccgtgcaggctatggtcaacaagtatcttgcgaaaatcggactcggcggcgccggatattccgtacacaagctgcgccatactgcggccacgctgatgtaccgccacgggcatgtggacatacgggttctgcaggacattctcgggcatgaaaacctcggaaccactgagatttacacacatacatccagcacccagatggaagaagccgtcaacgcgaatcccctctcgcaggtcaaggccaaaaagaactgatctccggcttctttagatattccttaattcttatttttatagtagagtgtgcaattatgatggtcgaaagagaaaatgcaaaaagcgagcaatacatttttcagtacaatgataatccttttagtgaggtgataacatataaaaacacttaataaaatatataaaaaggcatccaaaagcaacacaaaattcagagatacaaaatttttcatctgaaagcgtaaatgatgaaaaatttcgtaaattcataaaaattgcacaagctgccggctatagaatttataaagttataaaactgtaaggcagaaaaagattaaagtttaacaaactatatgtgcaggatttctattccattactatccgccaatcaggtgattatttttaaataaaaaaagctccgcaccagtataaaagtgcagagcttttttgtttttttaattcaggtgttctttcgtctcgtccgaaaaaacagattcttctttcagcgtgctgcggtcgaccagccggccgttgacgtacacgtacttcggcgcgtcatcctcatcgtcgtcaagctcgtccgcttcaaaggagaacgtctccccttcctctgcggcggcttttttctttgcggcctccgcttccttgttgtagaagggctggatcagatatttatccaacatcgggtaacctgcaaagctgcaaaggtagctgacaagcgaaaaaacaataatcaccaacagaagcagcgggatcgcgaggaatgcacccggacagaacagcgtgccgacgatcatgccgacgagaaccgctgtaatcagaatattgcgcggcaggccgaggatagcgaaaatgaacgcattgcggtagatgtggcgcagcttcagatccatcgtgacgatcatcagcggaatatagaactgtgcaaacagcatcagcacgaacagaattgcgcagaccgcgaacggcaccatgtacagccagttggactgcatctgatttgaatagaagaacaccgaaaaactgagaaacacataggcgacataaacgatgatcccgttcaggagcgacgccttccagttatttttgacggcctcccaaaaatcagaccagacgaacgcgtgctcctctctggcaaagttccgggtgacataggccataccggcggaaaacggcgccatgagaatgagcggaagcggaacagcgtagatcgcgtacagatcgagcggcccaaaaagcgatgtgttgaacgcaaaatgcgggagcggtaaaaagaaaatcacaaccatcagcgctacgaccacagcaaacgggatcatgaaaatcaggttcagctgcacgagtttcgacaatttacgccacaggatttcaaaaaaacgtacgggcgccgcctttttcggctcatccttgctgacgcccggtccgggcttatcgtaatttccgatcaatccaaaaaatgccacaaaatcaactccacaaaaaatttagcttgtccttgcacggggatgacaatcattatacaccgatttgacgtgattatcaagatctaataattgaacatatacctgtgtcgatgaaatgtccgcatgccccatcatcgtttgaatatccttgacggacgcgccgttttgcagaagatgcatcgcaaaggaatggcgcagcgtgtgcggggtgatctctttcgttataccggcctctgtcgcatagcccttcacgatcttccagaagccctgacgcgtcaggcgcgagccgttcagattgacaaacagggcgtctccgctttccggatcggcgatcaggtcgcgcatgcggtagatataatccgacacagccacaatcgccgagggatagaccggaatcgtccgcaggcccttactgccctgacagtgcaggacgccggcgcgcaggttgatgtctcgaatattgagattgatcagctcgctgacgcggatgccggttgcatacaaaagctcaagcatcgccttatcccggcagcccttgggatccgtcacgcgcggctgcgccagcaaaagatcgatttcttcgccgctgagcacctgcggcagctttttctgcgccttctcgagctttacggtttttgccgggttgctgtccaactcaccgcggaaaatcaggaacttatagaagcagcgcaccgaggcgatatttcgggaaatcgtcgtcgcagagcgattcaagccgcgcaggtattccacatagctgtccagcacctgctcatccgcaagaacaggagacgccaaaccgttttgggacagatagtcgagaaagaacgcgacatcccgcagatacgaatcccgtgtgttgacggaattcgatttttgattgatcaggtattcccgaaacaatgaataatagtcgttcatgttcccgcctcctcagaaaaaaatcgcagccagaaatacgcttccgcagcgcacagccgccgcacagacgagcagcagaagcgccaaaaggaactgcatgccgcagcttttgaatgaaaccggcgcgggctccttgtgtaagagctgtgcggctgattttaaagcgcccccaaaaacacgcccggaaaaaaccaaaaatacaagcgtgcaaaaggccgcggccggcagataggtcagccagctctgaaaatacacgcctgtcccctccgcagtcagaagcgcggaaagcgatgcgccgagcgtgaagcctctgccaaagaccgccgccggaataaccgccacgccgagaaatgtcatgccaaagaaaaatacaagcagcaggtaaaaaaggaagtcaaagagaaacgccgaaaaaatacggtgccaacccactgccgtatccgcgagcatcccgttgaaaaacacagagctgcccgcaaaagagaccggctgcggcgaaaacagaacgaacaggcatccgacccacacgccaatcaaaagcagcgctgcaaagagcatcgagccgaccggcattttcagatccttcctgagcttatccatttatacgatcacatcccaaaccagaatggtaaaggatatgcccgccgcacccgccgtatgcctttatatggaaagctcctccgcctgtttttcgcaggcagtgaacgcagcctccatcgtcccgtcaaaatccttttggtccaaaacgtcgagcagcgcaaaggttgtgccgccctttgacgtcaccatgtcgatcagggcctgcggcgtttttccgcttttcaaaagcatgtctgcactgcccttgagcgtctggcagaaaagctccagcgctgcttcgcgatcgatgccgcgctgctccgcatagccgcaggtcagcgccgcaaggcggtacaggcaggccggcgagctgccgctcaccgcaatcaccgcattcatctgcgcttcatcgatctcacgaacgataccgcagcaggagaaaatgcgggaaatttctcggaacgatgcgtccggcacgtcctccgtgcggcaaagcgctgtggcgccctcgccgagcagcagaggcgtgttcggcatcgcacgcacgcaaccgcatgcgctgccgagcgcatctcgaagatttttaaaggttatacccgccgcaatggaaacaaacaatacatcgcttgcttttttatttgcaaccgcaggtttcaactcctcaaaaaccgccggaaaaacctgcggctttatgcagagaaaaatcacatcgcatcccgcagccagtgcagaaatggaatcgcagacgacgcagccgcgttctgcaaaacgctgcatcttctcaaaatggggattatacatgcagatatgctccggcgaaaccgcatttgtagacaaaataccctcaataatggcggcagccatattacctataccgataaagcccagctttttattttccatccggcgtcctcctctgcggggttcatgtactatactatatacctttttgccggattttgcaagagaaaaacggatattttttcattcgagccgcaaaccttcggattttatgtataatatgttatgtaaacctatgtataaacaccagatgttgttatggaaaccgcgcctgcataaagatacagggcgcataacgccctgtatctcaaaaccgaattttactttttctcccaacgccaagaacgccgccgagcgcgccgcaaagtgcaaaggaaaccacgcgcacaccgatggaggcgatgtccacatctgtataaagcgccagcgatacagcgagatagaggaagatgtagcctccggcaagcgcgagcccgtggagcagccccttctcccctgtcatgcgcgccgtcaggaaggctgccgccagaacagagatacatccggccgcaagcgccatcgtacctgcgatttcattcggaaggctgcccattttcaggatcagaaccgaaaagagcgcaagcaggccgcacgagagcaaaacctccgccgccagaccaaaaaccagctttttaatttgcagcatagaaaaagacccctcagaataagtttgttcatacttattccgagaggtcttaaactattccgatttttatgcgtcttcctcgtggatcgtatccacattgccgatggcccagcgcttgacgcgcagtcttgctctgtcgctgccggtctcaatgatgacgctttccgtctcatccttcacagcgatgattctgccgcagataccgccgatcgtcgtcacctcgtcgccgacctgcgcgttctttctcatttccgcctctttctttttcttcttgctctgcgggcggaagaaaatgaaatacatggctgcgataagaccgccgtacacgacaagcataatcagcatggaaccccagccgcctgttgccgcagttccggcagcatccatcacattgaaattcatatccgttatctttcctttctgtattggcgcatacgcctaaaactcacaatatcgattataacaagaacaggaaatacttgcaagcaaatttcatattcttttttgaatttttttaaaacgacctaaaatatacggctttagaagggtgcacgctcttatagacgcaccgtgcatctgtaatcccgcgcagctaagcggccgattaaatcctttttcccagaacctccgcatacgtgcggtagaaatcctcaaacgtgccgttgtccagcgcgctgcggatgcgttccatcaggttgttgtagaaatagaggttgtgcatcacggtcagccgcatagcgagcatttcgccggccttaaaaagatggtggatataggcgcgggaatggcggcggcagatcgggcagtcacaggcggggtcgatcggctgatcgtccagcgtgtattttgcattcagcagattccggcagccctcgttcgtgaacgcatggccgtggcgggcattgcggctcggcatcacgcagtcgaaaagatcgacaccgcgataaacgccctccagaatgttggccggcgtcccgacgcccatcagatagcggattttattcttcggcatgtgcggctcgaccgcctcgatgatgcggtacatttcctctgtaggctcgcccaccgcgaggccgccgatcgcgtagccgtccaaatccagcgcggcgatctccttcatatgcgcgacgcgcaggtcggcgtaggtcgcgccctgattgatgccgaacagaagctgctgcgggttgatggcgccctccgccgcattgaggcggtcgtgctccgtcttgcagcgctggagccagcggaccgtgcgtgcgcaggagttccgcgcataatcgtattccgccggattcttcatgcattcgtcaaacgccatcgcgatggtcgagccgagattcgactggatgcgcatgctctcctcgggccccataaaaattctgtgcccgtcgatatgcgaggcgaaggtcacgccctcctcgcggatattgcgcagcttcgcgagcgaaaaaacctgaaacccgccgctgtccgtcagaacagggccctgccagcccgtgaatttatggatgccgcccagcctgcggacattttcgtcgcccggccgcagatgcatgtggtatgtgtttgaaagcatgacctgacacttgatgtccttcagatcatatgcggaaagcccgcctttgatcgcggccgccgtcgcgacattcatgaacgccggcgtctggaccgtgccgtgcaccgtctgaaattcgccgcgccgcgcgttattttcctgtttgagaagcttgtacatgggtcaaattcctttcagccggaagccggcgctacgcgctgatctccgaaaaatcccggtctgcgcggatcggtttaaatccgcgtctctgaaaacaggcggtatcaggaagtccccataccgccgcatctgttctattatattgtttttcgctccaaatttcaaccgtatcgcacaaaataaaatgcgcagaaaaatgaaagtacggagccatgcggtgcggcagccgcaggtgtatcgagcctctgcgccgcagaatccgccgcagagcgtttcatcagctgcgccgcggcgtaaaccagtagccctccgccgcagcatgcgtgcagatgccgaacacctcgtccagcttcccgcctttcaaaaccgtctccggcgtgccctgcgccgccatcctgccgtcctgcatcaggacaacgcggtcgctgtagcgcagcgcatgcgccaaatcgtgcaggacaagcagaatcgtcttatcgcgctctttcaactgagcgagcatttccaaaagctcaaactggtggcgcagatcgagataagtcgtcggctcgtcgaggaagatcacctttgtgtcctgcgcaagcgccatggcgatgtagacgcgctgccgctctccgccggaaagcgcgcgcagatcccgatccttccacgctgctacgcccgtgatctccatcgcgccgcgcacagcggccttatccgaagcgcgcatttggcgggaaagcccgaggtacgggaaccgcccgtgtgctacgagcgcccccactgtaatggacggtacggtgcgcacctgcggcaaaaacgccgccgtgcgcgcaaacgccttacgggaatagctgtgcacgggccggccgtcaatccggatctctccggccgcaggcaaaagctgccgcgccgccgcccgcaggagcgtcgttttgccgcagccgttcggcccgatcagcgttgtgatctgcccgcgcggcgcagtaaagctcacatctttcagaatacttctgtccggggcatagcccgcggttacatggctgatctcaatcatagacacggctccttttgcggcgcagcagcattaccaagaaaaacggaccgccgagcagagacatcacgatgccgaccggaatctcaaagggcgcgaacagcacgcgcgccagcacatcgcacagcagaacgaacgcgccgcctaagagcaggcacgccggcagcagccagcggttgtcgtttccggtgagccttctggccatatgcggtacaagcaaaccgacaaagcccagcaggccggcaaaactcaccgcgccgcccgcaagcagcgccgcagccaaaatggcgagaaaacgtgtgcgccccaaatgcaggccgaggctctgcgcgctctcctcgccgagctgcaggacgttcaggtcggcggccaatacgaacgcgagaagcaggcccgcgagaagataccacgccgcgccgccgaccgatgacagcgtgacgccggaaaagccgcccagcatgaacccggtcgcgccgatcacatcatccggaaataaaagcgtgatggcatttacgcccgccgtcaaaatactgctgaccgcgatgccggccagaatcagcgttgtgcgcgaaagccccgccttcacggccagcgcgtatacgaacagcgccgtacacagcgcgccgaaaaacgaagcggcgggcaatgcgcccgccatccccggggccagcgtgaccgcgagcatggcaaaaaagccggcgcccgcgttgacgccaatcacattcgggctggccatcgcgttgttgagaaccgattgaatcagcgcgccggccacagcaagcgcgccgcctgccgcaagccccgccagcgtgcgcggcagacggacgtgcacgaggatgcgccaaacgggacccgaagattcccggccgtacagcgcggagacgagctgcgccgccgtataattctggctgccgaaccgcaggctcagcaaaacggaaagcaaaagcaaaaccgcaagaccggccagaacagcgactctgcccttacccgatttgggcggcaagctccggatacagaatttttgcaagataggcataactctccccccagcgcgcgttcggtttatagtggaacaactccttcggaagctggatataccgcccttcgcggacagccgtcagccccgcccatgccggattgctctcaaaattctgcttcatatagtcgagcgccgccgcttcgctcgagcccatcgtcacgacaaagatgaagtccggatccgcggcgatgacctcctcgaggctcacgtcctccaaaaggctttcgtactgctccaccagattttccgcgccgagctcccgcagcatgacgcccgccaaattgtcctcgcccttggccttggcgccggtcgaaaaggcgcgcagaagcagtgcggtcggcgccggctgcccctgcacgatgtccagaatgcggtcgatctccgtctgcaccgcaaggccgttctgcgcatacaggtcctcccggccggtcatccggcagaactgctccagcatctcgaggtaatcggaaaagtgatccacgcggtagtaggcgtgcgggatcccggccgagatcagcgcctcgtgcagatcgacatgctcggcggtgtcggcggaaaggatcaggaaatccgggtcagccgcaaggatcgcctccaaattcggctgtttcacgctgccgagaagcgcgacatccgcgccgagctccatgccgcgttcctctacggcgtcgctggtcgcgccgatcagcgtgccgcccgcaagcgtccacgtctctgcaaagctgccgtagagcgacgccacccgctcccagttcgacagggtgacggaatagcccagcgcatctgtaaatgcaatttgctttacagggtcggacgccgcgctttcctcctgcacggccgcgccggactgcacggcgtccgcatcggtttgcggctgtgcagcagcacagcctgtcagcagtacagccgcaagccatgcgcataaaatagatttgaaacgaatgtgcttcatggtatccctcttttcaaaaatttccgggccgatttatccttgtcggcgcagagacaaagcggcggcaaggccgccctactgccagccccgcgctttcgggtccaacatatttgtggcggcatagatcagcgcattgcatacggccgccgcgacattgctgccgcccttgcggcccagcgcgacgatcgcgggcacatctgccgcttcacacacggccagcaggcgcgtcttgctctcgaccacgttgacgaaccccacggggacggcgatcacgagcgccgggcgcaggccgcgctcaatctgcgcggtgatcggccacagtgcggtgggcgcgttgccgacggcgaacacggcgttcggaaactgtgcggcggcaaaatccacagcggcggcggcgcgcgtagtgcccgcttccttggcgcgctctgcgaccgcctcctccgccataaagcagtggacggcgcttttgaggcggaggagccccggcttgctgacgccagccttcgccatattcgtgtccgtgactatcggcgcccccaattgcagcgccgcgataccgcgccgcacggcgccgggcgtgaagcgcaggtttttcgcgtagtcaaaatccgccgtcgtgtgaatcacccgctttataacggcggcattctgtgcatccaaacagatcccctgtttttcaagctcttcgcttatgatcgccatactcgtccgctcgatatcggcgggcagaacatgcttctgcgttccgttcaaaattccacaccctttctggcggcgatgccgctctgatacggatgcctgcggcaaaccatctccgtggaataatccgccgattccagcatccacacagccggctcgcggccggtcagaacgatctcgcgctgcggcgggcgctccagcacggcacggcgcagcaaggcctcatccaccatatccatccggcaggccgcgcaggcctcatccagcaccagcagatcgcagggctgttccagcgcctgccgcagatgcgcattgtgcagcgctttcgacgcggctttttcctccggcgtcatctgaaacacaaattttgtcccggccttgccggtataaacggccgcgccgagctttcggagcggctcgagctccccgctccgcccgcttttcagaaactggacgaatgtgacgcgcagaccgttcccgagtgcgcgcaatgcaagcccggcggcggccgtcgtttttcccttgccctcgccccagtagagatgtacgagtcccttatccattccggtatgcctccatcgcttcgtaaatgcgcggcatgtcgaggctcgcgcgcacggcatctgccagaagatcatactgccgctctcggtacacggtatagtcctccggctttacacccgcggggtcgagcccccggctctcgagcagccatgccgccagtttctgcgtcagctcgcccgtatcgaacaggccgtgcaggtatgttccgaatacgtttccgagcgcggtgccttcctcgcggccgtcctgcatccgaaacagggccgcgccgcccgcccgcgtcgtctcgcccatgtggatctcgtatgcggtcacggcagcgccggcaaacggctgcgctgctgctgccgccgtaacctgacgccggtgcttttggcggacaaaccgtgtgcggcacggcagcagccccataccgagcaggctgccgccccgctccacagcctccggatcgtccagcgcctccccaagcatctgatagccgccgcagatgccgagcaccggcgtgcccgacgccgccagtttcttgatttccgcctccaaaccgctctgccgcagccagagcagatcttccatcgtgctttttgttccgggaagcacgatcagatccggccctcgcagctccgccgcacgcgcagcatagcgcacgccgagtgccgggtggctctccagcggcgcaaaatcagtgaaattcgagatacgcggcagccgaatgaccgcgatatcgatcgggcgctgcacctgccgctttgcaagccgcggcgaaaggctgtcctcgtcgtcgatatccgcgtgcgtgtacggtacgaccccgagcaccggcacgcccgttttttcctccagcatcgcaaggccggggcgcagcaaatcgacgtctccgcggaatttattgatcaccgttccgataatacgcgcgcgctcgtccggttcgagcagcgccgtcgtgccgtaaagctgcgcaaaaacaccgccgcggtcgatgtcgccgaccagcagcaccggcgcattcacgagctttgcaagccccatattcacaatatcgtccaccttgagattgatctccgccgggctgcccgcgccctcgatcacgatcacgtcgttttcggctgaaaggctctgaaaggcgcgcagtatctcggggatcagcgtccttttcatcttaaaataatcggctgcccggtactgtccgcgcacctcgccgttcacgataagctggctgcctgtgtcgctggagggtttgagcagaatcgggttcatgcgaacatccggctcgacgcccgccgcttcggcctgcgccacctgcgcgcggcccatttcgaggccgtcccgcgtcacatagctgttcagcgccatgttctggcttttgaacggtgcaacgcgcaagccatcctgccggaaaatgcggcaaagcgccgttgccagcaggcttttgccagcgccggacatcgttccctgcaccataatacatcggctcattcaaagcacctcccgcaacgcctgcaaaaaagcgtcgttttcttctttcgtgcgcaccgccgcccggtaccatccggctgagaggccgcggtaattgccgcatgtgcgcagcagaattcccctttcccgcagcttttccgccagactgccgtccgcatgaaaaaacagcaggtaattcgcctcgcccggcaccacccggcagcccaaggcggaaagccccgcagaaagccgcgggcgttccgtgcagatcaggctgtgcagccgcctgctgtacgccttttcctcgagcgcagccagccccgccgcctgcgccggtccggaaacggcccacggctgaccgcaggcacgcatggcctcgagcagccgcggcgcgcccagcgcatagccgaggcgcaggccggccatcgcataccatttggtgaaggcctttaagatcagaaggttttcattcgccgcgagctgcggctcgagcgtgtgcgcctgcggttcatccaaaaagtcattgaagcattcgtccacaaccaaaagcacgccgcacgccgtgcaccgctcgagaatgcgcagcagcagcgcgggcggtgtcgtccgcccggtcggattgtttggctcacacagaaataccacgtccagtgcgggcgtgatcgcctccagaatttcctccgcaacaacgaagccgttttcctcgcgcaggtaaaagtgctccgtgcggcagtccgaaagcccgagtgcctgctcgtattccgcaaaggccggcgccgtaaccagcgcgcgcttcgggcggacagccagaaccagcctgaaaatcaggtctgccgcgccgttgccgcagagcacggcatccaccggcagcttgtgccgcgcgccaagcgccgacgaaagcgcgcggcacagcgggtcgggatagcggtcggccgaagaaagcgacgcgcagacggcgcgccgcacgccgtccggaagccctagggggctgatattcgccgaaaaatccaagggcatccgcccgtactgggccataaagccggcccaatcgccgccgtgcgtcaatttcatcgttttacattccctttcacaacagaatccacaggatgcgcaggcccgcgaaaatcgcgaagctcaaaaagctcgcggcatacagcatccggttcatccgcagaatatcctgcgggacaatctcgcgctgcgcatcgccgatcgtcggcttgtcgtgcagctctccaaagtaatacgccggacccgcaagctgaatccccagtgcgccggccgctgcggattcggtctgtgccgaattcgggctcgcgtgcctgcgcctgtcccgccgccagatccgcagcgcaccgcgcgcatcctgccccgtcagcgccgccgaagcgatcagaaaaagcgccgaaaggcgcgacgggatatagttcgccgcgtcatccagccttgccgctgcgcgcccaaaccagaggtaacgctcgtttttatagccgagcatgctgtccatcgtgttgatggccttgtagcacagcgcgagcggcgcgccgcccaaaagcatgtacagcatgggcgcggcgacgccgtcggaaaaattctccgccacggtctccacggccgcgcgcgcaaccccatgcgcggagagcgcgtccgtatcccgcccgacaatgcgtgcaacggcgcggcgcgcctcgtcgagcgtacccgaaacaagcctattataaacgttccggctctcatcgcgcaacccttttatggcgagcgcctgccagcaccagatgacggcgagcaaaaaacgcagcgcgggatgcaagaggccgcacagccaaagcgaaagaatactgaccgcgagcgtgccgcacggcagcagcgccgccattacaacaccgcctgccagctcgccgcgcggcgtctttgggaaaatgcggcgcagcaccttttcgagcgctgtgatgccgcgccccatggccaccacggggtgcggcatccacgccggatccccaagcagcaggtctaaaataaggccgcaggccgcggcgacaagaatctccatcacttaatccttttcatagcgcacttcgcgcacaagctccagtgttttttcgctctgccagcggtcggcgcacagaatatacccgccgccgtttggagcgcaccacgcgtaataatcccgccgcggcaccgcatagcgctcgaggacggccatctgcgtgccgccgtgcgccgcaatgacaagcgtattctctccggcgcggaccgccgcgtctgccaaacgctcgaatgcggcgcacaccctttcggagaattccacccggctctcgccgccgggacatctccccatacagccgccgtccacccatgcgcgatacgccggattatgctccatttcctcgtaattacgtccttcaaacgccccgaagcacatttcccgcagccccggcacgacggtctgcgccgccgtcggaaacaggattgacgcgctttcacgcgcccggcacagcggcgacacgtataccgtgcgcggcgagaaatctgcgcgccgcagcttggcccgccccgcatcggagagcggaatgtcccgcacaccctgataccttttttcggcgttataggcggtttccccgtggcgcagaagatagatcagcacggccattccccctttaaaagctgcggcagcccgcagcaaacgcgcacaaccgtgtccgcacgcgcggccagcaggcaggccaaacggccagccgcctcccgcgccgcacgctccgccggatccaccggcacgacaccgccgccgacctcggttgcgatcacaatctccttctgtgccagtctgtcggcgagtgcctcgagatcaccggccgtctccgcaaggcactggacatcccacacggcggccgcatcaaacgcctgcggcgcaagcccgagcgcatttcggatatattctctctttcccgcaaaaagcggcccggtaacaaaaatcaaagcaacccctccaaatactgcgtgatacacagggcggcgagcatccaaagctccgccgtctgcaaaaaccagcctgccaagtcgcctgaaaggccgccaaactgcacgcgcgtcatatgcttataccagcagaatacgcatacagccgctaaggccgccgcaagaccgccccagcccgaaatgcacaatgccgcccccaatagtccagacgccgccgcaagaatccggcagacgcgctttctgtctgccgctgcggcgaaggtgtgggcaagccccgtgtttttcgccagcgggaaccaagcgacagcaaggccggaaagcgttctcgaaaggcagaacacgagaatcaggacagagccgccgctgcgcggcatggccgcccaaatcgcgaaggaagcgacaaaatagcagcacagccgtatggcggcgaaggcgccgagatgcgggtcgcgcaggatctcccgctttttctccggcggcgcgtggctcgccagtgcgtcgcaggtgtcggcgtagccgtcgaggtggatgccgccggtcaacagcaccggcagcaggcactggccggcgccgcgcagcagcgcgggaagcgctaaacagccgcacagcgcggaccagccccagcagatcagcccgatcacggcccccacaagcggaaaggcacagagcgcataccgcatattttcccggctccattcgattctcggcatggggaccgcggagaacatcgaaaacgccacgatcacagtctgtatcacaagcaaagcaggtcgccgcccttcaatggattgacccggccgcagacgatctcggctacagcgtccgcgcgcgccgccaatacgcggttgacctgtgccagaccgcgcagatacgaaagcgtgccgccggcatactgtgcgccgccggaaaacacctcatttgtgacgattgtcaggtgccggcatcgggagagcagccgctccgcgccccgcagtgcgccgtgtgctccgtgtccgcccgggccgtacatctcgtttgccacaagattgctcatgcactcgagcaggacattcgcgccggccggaacgcggctgagcgcgtcccccgtgtagcattccagcgtctcaaagccctttccggcgcgctgcacccggtggcgctggatgcgcgcccggcattccgcgtcgaacggctgcatggtggcgacatagattctgcttcccggcagcttctgcacgtggttttccgcgtattcgctttttccgctggcggcgccgccgataacaagtgtaaacattccacttctcctatttctgcgggacgtagggcgctatgcccagatgcccaaaagtctggctgctgtggtaaaccgcgagtgccatatccaaaagcggcagagccgctaccgcaccgctgccctcgccgaggcgcatcccggcggtaatcagcggctgaagcccgagcgcgccgagcaccatcgcgccggccggctcagcggaaacgtgactcgcaagcatcgcacaccgggcggcaggacagatccgcacggcgcagagcgctgccgccgcgctgatgaagccgtcgagcagcacgggaacgcgatgctgcgcacagcccagatacagaccgcagagcgcggcgagatcgagtccgccgaccttgtgcaggacgtcgaccgggtcgtctacatccggccggttcacgcggatcgccgtctcgatcgccgccgcctttcgggaaagccctgcatccgagagccccgcgccgcggccggtgacctgtaccggaggccggtttaaaaggacgcttgcgacggcgctcgaggttgtcgtgttgccgatgcccatctctccggcggcgaggatgctcacccccgccctcttatattctgcggccagatcggccccggcttgaattgcccgcaggcattccgcacgcgtcatcgccggccccgcggtgatatccgccgtgccgcttcggatgcggcggtccagaatgccggacgcaccggcaaagccgcgcatccccacgtcaattggcacgaccgcgcagtccgcaatgcgcgccatggcgcacactgtgctttcccccgccgccagcgcatgtgccacagcggccgtgacagaatcatccgtctgtgtgacgccctgcgccaccacgccgttatctgcacagaacacgagcaggcggcgcacgggaatccgcacgtcggcgcacccggtcagcgccgcaatccgcacaacagcctcctcaagcaggcccaagctgccgagcggctttgcaagcccgtcccaacgcgcctgcgccgctgcgcgggcggccgcatccggcgctgcgattttattttcccattccagcttcatatgcgctccttatgccagacggccgcggctgccgcaaatcgctcggcgatcggcagcgccccgccgaaatgcaggtgcggaaagcccgcgtacaggctcggcgacgcatagcagcaggcccattttttcgatccgcccggcttcacggcttcgagcacgcacccgttttccgtcgtatcccaataatgaaattcatggacagggactgtctcgccctgtcggaacaacaggctgtccgccgtggcgttcaaatacagataaccgaagcgctgcagccgccccgtttttatgccagcgccgggcagcgcccccgccatcggccacggcgctccgccggcgtcctcaaggcttctctgtaggtagaggaaaccgccgcactccgcaacggttggcaggccgcgccgcacagcacagccgatgctttcccgcatgccttcgttttggctcagcgcctgcgcgtacagctcgggatacccgccgccgagatacagcccgtcggcactttccggcagcgcctcaccgtgcagcgggctgaagtaagcaagcgtggcgccgcagtcccgcaggcgatccagattatccgcataataaaagcagaacgcctcgtcccgcgcgactgcgatcgtgcatgccgatttcgcacagtcggaaagcggcgccgcagaggatgcagcatcagacgccagcgccagaatcccatccagctccgccgttcgctcaagctgatcggcaaccaattcgtaacgcgccgaaaaatcctgtatctcctgcgccgtgaggagccccaaatggcggctctctacggcggcctgctccatatgcggcaggtagccgagcacgggcagaccggtttcacgctccaaaagcggcgcaagatacgcgtaaagcgacggcttgcagccgttcagaaacaggccgacaatacggctcggcctgcggaagtccagcattcccttgacctgcgccgcaagcgtcagtccgacgcccgtgggccggagaacaagcagcaccggcgtttccagcagatccgcagtctcccatgcgctggcggataccgtaccgcctgcgccgtcgtaaaagcccatcgcgctttcgagcagtgcaaaatccgcgccctgccgctcggcataccccagcgtccgccttacaccgtccgccccctgcaaaaacaggtcgagattgcggctgggcaccccgagcacgcgcgtgtggaacatagggtcgatgtaatccggcccgcatttaaagcctgctgccgctgttccccggcgtttcagcagggcgagcaggccgcaggcgagcgtggtttttccgctaccgctgcccatcgccgcgagcatcagccgcctcatttcggcacccccgtgacaaggaacaccgggttctgcgcgaacagcatatgcagcgcgcccgcgctttttgcgcggctcacgccgatctgcacggcctcgacagcatagcccagccgctccagcttctgcatcgcggtgtgcagcgtctcgagcgcaatggcggatacgcagatgcgcgcctgggcgttcgccgcatgcgccgcatccagtatggctccgaggctgcctccgctgccgccgacaaatacggcgtccggcttcggcaggccggcaagtgcttcaggcgcccgcccctcgaggacacggaggttccacgcgccgaagcgcgcgcgattggcccgcaccagcgcgcaggcttcggtttgttcctccacagcccagacggccccgccctgcatcgcaagctccacgctgacgctgcccgtgccggcgccgatgtcccagcagacgtctcccgcctgtacggccagcttggccagcgccgccgcgcgcacctcctgctttgtcatcggtatttttccgcgcacaaaggcttcgtccggcagaccgggcgtgcgccgggccatgcgcggcgcggcatccgccaaaaggacgctcagcggcgcgaaggctttgtgtgcgaaaatctccgccgtgccggtataaatctgctcgtccggataggagagattctcccctacgatgacgggcagggcgccgagccccgcatcggtgagctgcgcgcagagcgccgccgggccgagcgtgccgcctgtcagaaaaaaggcgggctgtccgcagcagaccgccgtcaccgcgtcgcaggatacgccgtgcgcggagcagagcttccaatcctgccatgcgcgcccgagccgtgccgcaaaatactgtaggctcgagaggccgggaagcacccgcgcatcgaccccgcgcgcctttaaaagcggcagcagatgacgcgtgcccgaataaaatccggaatccccgctgtacacgatacagggacaccacgcccgttcttcttccagaagcgcgaggatttccgccggctttgtcgccgcacggcgccgggacgtgtactgcggcggcagagcttctaagagccgccgtgcgccgacgatcagatctgcctgctccagcgcctgctgtacctcggcggtcatcgtttccggcgcgccgcagccggtgcctgtcaatgtcacggtcattttgatccctcctcaaagtgcttttaaaatttcttccatcgtctgcccctgctgtgcgggccggctgatcagaaccagcgccgcgccggcatttcgggcggccgccagcttttccgcgaagccgccctgccggccgccgtccttcgtcacaagccatcggatgccgtactgctccagcatggcctcgttcagcttctgcgtgaacggcccctgcatggcgagaatgtggctgtgcgcaagccccagcgccgcgcaggcgtcgatgccctcgtgcgtcggaagcacgcgcgcgtaaagccgccccttttcgagccccgcaaacgcaccgagctcctttgcgccggtagcaagcaaaatgttgccgggtcggccggaaagaaaggcggcggcctccgcacagctttgcacgcatacggcgccgtccgccgtgctttccggccgcagcaggcggcgcagtgggatgtgctccgccgtgcaggccgcgcggatattcgccgaggcctccaccgcataggggtgcgtcgcgtcgatgcacagatccaccccccgcagcatttttcggatttcttcggcgtcctttctgccaatctgcacggaaacgccggagaggccgccgagcatctcagcgccgagttctgttgccacgctgaccgcaactgaaaatcccttttccgccagtgcgccggccagcaggcgcccctccgttgtgccgccgaaaaccagtatgttcatcgcttcgcctcatagccgcgcggcgtcaccatcgcgccgggcgaaagctgtgccgtggtgctgctgccgataaaaacggtcgtgaacatatcgagctgctgctcccgcaatgcccccagagtcagtattttactgctctgcgcctcgcgcccgatgttccgcacccagccgcacaccgtttcggcgctgcggtattgcaggaaaacgtcgcacgcgcgccgcaggtaatccgcccttttctttgaggcgggattgtagatacaaaccgcgaaatcacctgccgccgcgcattgcagccggcgctcaatcagcggccacggcgtcaaaagatcggaaagcgagatcacacagaagtcgtgcccgagcggcgcgccgagcaccgccgcgcccgaaagtgctgccgtaacgcctgcgacgacctccacctccgcgttttcccggccggccgccatctgcaggagcagccctgccatgccgtaaacaccggcgtcgccgctgcacacgaccgcgacggtttttccctctgcggcgcggtccagtgcccacgcacagcgctccctttcctgcgtcatcggggtcgcgaaaatcagcttcccgggacacagcgcgcggaccagatccacatacacggtgtatccgcagatcacgtcggcgcgctccaacgccgcgcgcgcctgcgctgtcatatattgagctccgccggggccgatgccgaccgcatataccttacccattttgccaccgccagtccggggcaaacggcatgagcgccatcgccagcgtcacgccgccgcccgcaaattttttcagatatagagcgccgccgctcccgcagacggccgcgcgttcgcagacattgtccacgccggtcacgcactggacgaacgcggaggcggaaaacacgccgccgaccgccgcaagctgctgcgccgagtaggtctcaaacggcaggctgtgcttcgcacagaacgcggtgagccccggctccgcctttttcagatcgatgctgcacaccttgcagatcgcctgccggtgcacgcggcccgccgcgagaaacgccccgagcgcccgctcaatttccgcacacgccgtaccctttctgcaccccacgccgagaaccgcgaccgctggaatgagatgcagcgcatcgtcctcctccggccacagggatacgcggatatcgcacgtgctgtccgcagtaatgcggacacactccggcggcgttccggcaaccggccaatcgctgtacagcgacaccgtaccgcccgccaaaagccgcgcggaaatccacttgatcttctccgggttcagcacgcgcatcccctgcaggcgcgcccattcgtccaccgcaaacacaccgttcgcatcggtcgccgtcgtcagcacgggcgtcgcgccgcagcacgcggaaatacgccgcgcaagcgcgttcgcgccgcccaaatgcccgctgagaatcggcacggcaaagcgcgcgcattcgtccacgaccaccacggcgggatcgtgtgctttgtggaggatatacggcgcaatcgcgcgcacggcaatgcctgccgcaccgacaaagaccagcgcctgcgcgcggctgaacgcgcgctgcgtccaaaccgcaaggctgtccggcgcgttgcaccgcgacgcccggccgcccagcaccgcggcaagccgctctgccagagcaaagcccttgtccgtaaacgccagaagctcaatctccacgctccgcctccctgaagcccgtggaaaacgcgggatcgtacagcttgctgcgctcgtaatcgccccggaggaaatcaccgaccaagacgagcgccgtgtggctaatcccgttctgccggccggtttccgcaagcgcgccgaggctgcaccgcacgaccttttcctccggccacgtggccttgaatacgatggccgccggcgtctcccgcgtataggcgccctgcagcagcgcctcctgcaggccgggcagcatgccggcggagagaaagacgaccatcgtcgcgccgtgcgccgcaagcgcggcaatgctctcgcgctccggcaccggcgtccgccccgccatgcgggtgatgatgaccgactggctgacgccggggagcgtgtattcggcacagagcgcggccgccgcgccgcagaagctggaaacaccgggcgtgtcgtcatagggaatcgcaagccggtcgagcgcatccatctgctcgcggattgcgccgtacaggcatgggtctccggtgtgcaggcgcacggcggtctgtccgcttctgtgggctctctcgagcacgccaatcacctgttccagcgtcatttccgcgctgttgtataccgaacagccctgcctgcaaagcccgagaagcgcgggatttactagactgcccgcgtaaaccaccacatccgcctcggcgagaagcgccgtgccgcggcgggtcaaaagatccagggcgccggggccggcccctacaaaatgcaccattgcgctcactcctttacaacaatcgtcgtgaaatacccggcgggtaccggcgtttccgccgacagtctctcccacacggcctcgccgggcaggccgcagttttgcaccgccttggcgttcagccccttttcctccagcatgccggccacccgcgccatgcttttgccggatttcatcaggattttcgtgccgggcagcgcgagcagcgcctcagtatcgctgccgcccgcaggcaggatatgcagcggcgcattcatgctcgtcaggctgacgccaagccgagccgcaaccgcgcagaagctcggcacgcccgggatcatgcgggtttcatagcccttttcggaaagcagctccatcaaatagctgtaggttgcatagatcgagacgtcgccgagattcagcatcgcgacgtcctttccctgctcgagacagctttccaccgcttctgccgcagcgcggtgcgccgtttccagcctctgcgcgtcgcgctccatcgggaaaaacaggggcagaatcattttctcttttaagtccacagcctgcgccgcaatatccagcgccagcatggcgccgtctctcgtgcgcggcgcggcaataacggggcagtcccgcagaacgcgcaccgccttcagcgtcatcagctccggatcaccaggtcctacgcctacaccgtaaaaaacacctttcatcgctcccattcgcttaaaatctccttcaccgtatctgtttggcccaaaaggccgtattcgtttgaaaagagaacggcgccgacgcggaaactgccggccgcgcgccgctccagatgcgcctgcacggcccggagcaggctgccgagcacgggctcccgcagctcctcgcgctccaaaatctcaaggcatgcgtccgtcgtcgcggcggatagaagcgctgcgcacacatcccgcgaagcaccgcagacagcggcgtgcgcgcagaaaagctctgtgcggcagtcgccccagcggctgtgcgtgttcatgatgccgcccgccagcttgacgagcttcccggcatggccgacgagcagcaccgttttaaaacgctgtgcggcggccgcgtcgagcgcatcgccgacgaaattcgagcacttcacgaccggcacgcccatggcatccatgccctgcgcatgcagaaaatccataccgtaattccccggcgtcaaaatcacacgctttgcgccctgcacggcagcctgccgcagctcgagggcgatcgtatcgatcagcgcctgcgcactcatcggctccacgatgccggaggtgccaagaatggagatcccgccctccaccccgagattcgggttgaacgtctttttcgccatttccgcacccccgggcacaaagactgtcaccgataggccgccgtcataatcggcagcaccgcataccgcgcacacctgctcctcgatcatgcggcgcggcacgcggttgatcgcggcggcgccgaccggctggtcaagccccggcttcgtgacgcggcccacaccctcgccgccgtcgatccgaacgcccggcgccgctgttttttccacgcgggcgcagatcagcgcgccggcggtcacgtcggcgtcgtccccggcgtccttgcgcacggcacagaccgccgcgccgttctgaaggctgcacgaaagcagctccgcctcgacggcaacccctttcggcgtcacgaccgaggccgtcttcggtgcgtgtccgaaaagcagcagagcagcagcgccgccggccgccagtgccgcgcaggtgcccgtcgtatatccgcagcgcaggaaacggctgccggagcggatgtaatgctcaaacgccatacggttccacaagcgccttgagatggtcgcggtacagattctggataccgggatgcaggccgagcccctccatagcgcagcatacggagaatcccgccgcttctaagcggcttttccagctctcgggcgcatcgcccgccatatcgttcagcgcgtggtcgccggccaccagcatcagcggcgccagcaggacgcttcggcagccggatgcgcgcagctcactgagaacatcctcaaatgcgggccaaccctctacggtgccgacgaacgcactttcaatatgcgcgaggtgcagcgccgtttgcagtgccggatagaccatattcgcaaagtgatccgttccgtgcccaagccaaaccagcgcctctccggcctgcctcgggtatgcctgcgcctcagcggcaaggcgcaggagatcctcgctttccgaaagcaggggctttccgagcacaaggcgcgaaaagctgccggcaaagcattccgtcgtctccttgaccttgtcatactcaaagccgtacagcaagtgggtgggctgcacaaaaacctgttcgtaggacaaagctcccagcctttcgagcgcgccggcaagatccgggatgctttccccgcgcttttcccatatcgcgcggattttggggctcgtaaaggcgcggtaaaaatccagctcgggtgcctgcgccttcaacgccgcctcaacggcggcaataccctcccgcgccttcggcacgctcgtgccgaagctgacggcaagcagcgcttttttcatactcgttttcctcctgttcgtccctgttttcagttccgccacaaagcaggcgatgcgctcaatgcgtgccgtctatgcagggtatgcctctttcgcgcaggagctgcacgaccgcggtgatcgtcgggcagcgcgttccgtcccgcttcttcgtacaaacgcccagatgcacggcgtccgccccgatcgaaaccagacgatccagcttttcccgcatgccacgatccgtacgcggatccttcccgcagccgttgcagcgcataaacgccgccagctccgcctcctgccccgcatatcgtgcaaaggctttcccctttatattccatgcctgcaggcaggccacaccggcgcaaacctcattcgcccgaaggcagttcagcacagcgatttttttcatagctctgtttccggcgccattgccgcgcctctccctcttttctaaattcaatggtgctcttacgtctcgattggattgtccggctcatcctgccgcgcaccggaatgctgcggatggtacagaatgtgcaggagcccggttcggtcccgcatcacctcggcgtccacctcatagagcgtgcggatccgctccggtgttaaaacctcgtccggcgttccggccgcaacgatcaggccgtcctgcaccgcatacaggcggtcgcagtacatggccgcgatgttcagatcgtgaatcgcggcgatcaccgtgcggtccagcgcctttacaatatccataagctggagttggtatttgatgtcgagatggtttgtcggctcatccagaatcaggcacggcgtctgctgcgccagcgcgcgcgccagaatgacgcgctgctgctcgccgccggacagcgacgaaaacgagcgctcggcaaaggcggacatgcccaccgtttccagcgcctcacgcacgagcgcatagtcctccgccgtgtcgcggtccagagcgcgcttgtgcggcgcacgccccatgagcacgacgtcctgcaccgtaaaatcaaaattatagtagttgtgctgcgccaccacggcgatcttccgcgccgaatccttgggcctgtactccgaaagcggccgactgtcaatataaaccgcgccctgcacgggggaaagcacacggtaaatgcagcgcagcagcgtgctcttgccgctgccgttcgggccgattacaccgatgaactcgcggtcgccggcctccatgtccacgcccttcaggatctcacgccggccgagtaccgcatgaagctgttccgcagcgattttcatgcctcgtttcctccaaagccgtaccgccggcgcgccatcagatagataaagcacggcgcgccgatgattgaggtcaggatgccgatcggcagctccacgcccgggatcaccgcgcggcagagcacgtccgcccagatgaggaacaccgcgccggtcagcgcgctgagcggaaccagctttttgtggtccgtgccgaccagcatgcgcacaacatgcgggatcacgagcccgacaaagccgatcaccccggcgcagtacaccgcaaagcccacgagaacagaagagacgagcaggtagacctgccggtaaaggtgcagatctgtgcccagcgtgatggaggcctcatcccccagaagcatcaggttcagtgtgcggtgctgcgtccagaaaaacagcacgccgagcaccgtgagcggcaggatcaccgcatttgtctcccactctgcgcccgcaaggctgcccatcatccagaaagaaacctcccgcgtcgcatcgcggtcgttcgaaaagtaaacgacgcagctcgaaaatgcgctgcacagcgcgctgagcgccataccggccagaagcagcttcactgaggtcgcccggccgccgatgttcgcgaggccgaccacagcgatcgaaatggcaaacgccccgatgcaggccgtgacgcccacataatttccaccaaatatcacgcccacgccgagcagaatcgcaagcgttgctccgagcgatgcgccggaggagatgccgagcacatacggctcagcgagcgggtttttcacgacggcctgcatgacgaccccgctgaccgaaagccccatgccgacagccgccgccagaatcagacgcggcagacggatcatcaaaaccacgtcgtggatgcgcccggcgccgtacgccgaagcgtcgtaaagcccaaagagccggtgcagaatcacgcggtaggcgtcgccgaccggaatctgcaccgagccgatcgtgacggcaagcagaagcgagccgagcagcacggcaagcagcgcgaagcatgccaaaagataaaacggcttttcctttttcttcgccgtcattccgcttcattctccgcgtacaggtcggggtaaaggatctgcccgatgtggttcaggccgtggatagtgcgcacgccgctcgtatagacctcgctcagatcgatggaatgcacgtcgttgttctcgacgcactgcagactcgcataggccgggttctccatgaccgactgcacgtccgtctcatcgccgatcacgatcataacctcggggtcgatattcagaagatcctccgcgccgatgtcgccggcattgatcacgtcgccgcccatcgcctttaccatgtcgccggccagcatcgtgtcgtcgtacacccagatcgtatccttcatgaactcgacgatcagcaccgagcgcttctcgcgtccctcggtagccgccgttatgcgttccacctccgcgcgcatttcatccacaagcgcctgcgccttatcctccacgtcgaagatcttgccgatgttcaaaatatccgcgtattcgttttccagtgtgcgctgctcgctgatgctgtttgaattgagcgccatgtaggtgccaacgccgttttcgttccaataatccacgtcgccgatcgtcttatccgagaacgaggactgccagcccagaatgaaatccggctccatcatgaccgccgcctccttgctcatcgccgcgttggaatccttgaagtcgttgtaatactccatgttctccgtacatttcttgagctcgtcctgcaattcgggcagaaccgcgtcctcatccatgccgacggcgcagatgatcctgtcgccgaggccgagcgccagcatcgtctcgagcgaattcgaccagaacgtgatcacgcgctccggcgctttttcataggtgtactccaccgcttccttcgcatagttgaagttggaaacggtcaccgggtaatgcgccgtatcggtactgctcccgctctcctctgcggcgttttccgcgctgctttcagctgtgctctttccctcgctctttgaagcaaagtgctccgactccgagcccgcgcagccggtcagtaccgataccgcaagcaatgcggcaacaacaaatgcagtgatttttctcatgttgatttcctcacacaattattattttttctaaataaaaaacgcactgcagccgtgggctcagtacgttttccgtatagcaaagcaggcactgacgccagatgccgcatcaatgcagatttcctgtaccccttgagtccgaaaggttttcatcggccaaacggccgaatccatacacaagcggccatggatatattctgacttggccctcatcgccgtttttcgccttcccaaatcgcttcagtggctggaaagcaaaggctttcctgaaaaaccgctctgtccttacagcagcgttcctgtgcgggattttcacccggcttcctgcgcgttgcgcgcaaaatccatgtcgctttattcagttgtccgtcattaagaatacatgctttgccgcaaattgtcaactttttttcgggcgcgccggttccgcggctcagcggttattcttgtacgccgtgccccacgcctccatcgcaccgatgatcgggcgcatcgattcacccagcgcgctcagcgcgtattccacccgcggcggcacctccgggtataccgtgcgcgtaatgatgccgtcctcctccatcgagcgcaggctgtccgtgagcactttctggctgatgccctccagatcctttttaagctcgttgaagcgccacgggcgcgcaagcaggttccgcatgatcagtagcttccatttgctcccgatcagctgcaccgtagtcgcgaccgggcaggcgggcatttcctcctttgtcagcataggcgagcgtctcctttcgttctctttctgaaagccttatattaaaatcatatcgccgcgtgcggcgcctgtcaagcatccgccccattttttcttctgtataggtcaccttaaagtaaccgggtaataaaaaagtgcgtacttgtacgcgaagatataatttgtaaaataaaaggtacagcgagcggaaagcacgctgaatacaagaacggaggcaatatattatggcactctccaatcttttcggatggaacgatcagacggcggtttccgcctgcggcgccggcgataagccggagaaaatacccgcggcctgcggttccgcctgcggcgccggcgacaagccggaggaaacgcccgcggcctgtggttccgcctgcggcgccggcgacaaataattccgtccctgcggttcccggcgctctgccgggaattcccgaatacacaccggcagatgccggtctcttataaagcgaggttttctattatgaagcaatactttgcctttcagtggcacatcaccgatgcgtgcgaccagcggtgcaagcactgctacatcttctcggaaaacagctgcaaaaagctggattccatgagctgggcacagctcgaggaaaccttttacaagtgcctcgatttttgctctgtcaacaatcggctgccctatttttatatcaccggcggcgacccaatcctgcacccggatttctggaggctcctcgagctgatgaaatcgcacggcctccccttcaccatcctcggcaatccgttccatctggacgacgcagtgtgcgcgcggctgaaagcctgcgggtgccaaaaataccagctctcgctggacggcatggagcgcacgcacgattggttccgcaagcccggcagctttgcggtcacgctggaaaaaatcggctgcatcaaccgcgccgggatccgcagcgtggtgatgacgacggtttccggcgccaatatcgacgaggttccggacatcatcgacgccgttgtgaaggccggcgcggatgtattcgcctttgcgcgctactgccccacgagcgaggaaaaagacgtgggcatcgagccgctgcgctaccgccggcttctggcggaatgcgaccgaaaattcaaggcgtacgaggcggcaggctgcaagacctacttcaataaaaaggatcacctatggacgctgtacgcgtacgagaccggtgcgttcaagatccccgaggcggctgagcccggcacgatctacggcggatgcaactgcggaaactgccacatgaccattttgccgaccggcgacctgtacgcctgccgccgcgtgcagaacagcaaagtcggcaacgtatttcaggatcggatcgcggacgtttgggtctgccaaatggaacgctaccgcgattacgatcggttcgaaaaatgcgtcaaatgcgtgctcaaggcgtggtgccggggctgtccggccgttgcaagcggcagggacggggatttttacgccgccgacccacagtgctggaaggagattgactgacatgaacgaaacgatacagaccattttgcgccggcgttccatccggcggttcgacacaaagcagcttccggaggatacgctggatcagatcctgcaggccgggctgtacgcgccgagcgcgggcggccggcagggcgtgctgtttgccgtctgtcaggaccgcgcggtcaacgaacgcctcggcagaataaagcgggcaaattccagcccgcgcatggcgacagcggcgagctatgtctccaaagagcagccgagtattgcggacgaccccaatctgcgcaatgccttttatgacgcgccgacggtgatcaccctttttgcgccgaagaacttccttttttccacagacgactgcgccgctgccgccgaaaacatgatgctcgcggcggaatctctcggcgtcggctcctgctacatcgggcagggctggacggctttcgccgacccgtatggtcaggatatcctgcgctgctggggcatccggacggattactacgctgtgatgcagcttttgctcggatacccgcggcccggagacacgcaccccacgccgaagccccggaaccccggccgtatcctgcgcgtgggaggcattgactgatgaaggaaatctcagtaaaagcactgtcactgaacccattcaccgcattcggggacgactggatggcactttctgccggaacagaagaaaccggcttcaatgccatgacggtcgcttgggggaatttcggcacgctttgggaacgtggcagccatgcgaaccggctgcccacggcggtctgttatgttcgtcccagccgatacaccaaggcttttttggatcgcgagccatatttcgcattgtctcactttggcggcggcttcaaacaagcgctcgggtatcttggcagccactccggccggaatggggataaagctgtgcgggccgggctgacgcccgtctatgcgcacggcaccgtctttttcgaagaggccagtacggtctatatctgccggaagctctaccatgcaccgctcacagcggccggttttgcagacaccgccctgatccccttcaattatccgaagcaggattttcacgagatgtatgtcggcgaaattctgcgggttctggtacaggacgaaaagaaaggcacgtgaaaatctatggaatacagaatgatgaacggcacgctctacctgcgcgtcgatccgggcgaaagcctatgcaaatcaattctcgaggccccgcaaatcatctccacgggtgtggtcgcaatttttaccgcgccggagaaaatcggcaaaagattggacgccggcgccggaatcggcgtttgggacttttccggcgatccggaggctgcgccgtgccggaaggaggatgccgtatgacacaggatgagcggagacgttttctgatcggcgcgctgctcgccgaacagccgcagtacagggatacggcgcttccggaggacaagcaggcacagcgcctgcttctgcgggcactgctcaacgtgcgtccgccgcttgcggcccgcccggattttttaagggtgcaggacgcctacctgcaagcggtgaccgagcaaaagggtgtcgtcgactaccgcacgctccggcctgtacgggaccgcctgtatctgtggcagggcgatatcaccgcgctgaaatgcgatgcgatcgtaaacgccgcaaacagcggcctgctcggctgctttcacccgaatcacggctgcatcgacaatgccattcacacctatgccggtgtgcagctccgagccgcctgcgccaaaatcatggcacagcaggggtgtgccgaggaaacgggccgcgccaagatcacgccggccttcaacctgccctgccgctgcgtcctgcacactgtcggcccggttgtgtgcggccggcttaccgaccgagaccgggcgcttctcgcgtcgtgctaccgctcctgtttggcgctcgcagagcaaaacgccgtcaaaagcatcgcgttctgctgcatctctaccggcgaatttcactttccgaatgaatccgccgcggcgatcgccgtgcagaccgtaagggattacatccagcagacaaacagttctatagaggtgattttcaatgttttcaaggacatcgactatacaatctacagccgcctgctccaagagccttgagcgggttctggagagcctttctcaggcggacgccgtcgttatcggcgccggcgcgggactctccgcctcggcgggattcacctacagcggcgagcgcttccgcagcagctttgccgatttcgaagcaaaatacggctttcacgacatgtattccggcggcttctatccgtataaaacgccggaggaatactgggcctactggagccgctatgtctatgtaaaccgctatatggatgcgccgaagcccgtgtacggcaccctgctgcggctcataaaggacaaggattactttgtactgacgaccaacgtcgaccactgctttcaaaaagccggcttcgataaaaagcgcctgttttacacgcagggcgactacggcctttttcagtgtgccgagccgtgctgtgcggaaaccttcgacaaccgcggtgcgattctaaaaatgctcgaacagcagcgggatatgcgcatcccctccgccctgctgcccgtctgcccgcactgcggaaagcccctaaccatgaatctgcgggccgaccaagcctttgtggaggatgcgggctggcgccgtgcatccgagcgatacgccgcttttctgcgctcgcggcgcagccagcgcatcctgttcttagagctcggcgtcggctataatacccccggcatcatcaaatatcctttctggcagatgacggccgccaacccgcaggcggtttacgtctcggtcaacaacggcgaggccgtttgcccgcaggagatcagccggcaggccgtctgcataaacggcgacatcggggacgtgctccacgccttggaaacactggagaaaaaagcccaataaagcccataggccgcaccgcacggtactgcctgcggataatcataaaactgcgagggagcggcgctgtgcaaacggcgccgctcctgttctgcgccgtacatccggcgtcatttccgctctgccgccgcgcttcccgtaccgtgcaggccgcgaggctgaatgcagccgccgtttttcgaaatccatgcttaaaataccggcaaaaagcgtttttcccctcttgacagaatccggcggcaggtgtatcataacatcgttacatatcactgttatacggagtgtgtcatgcaggaaaattcaccggttacattgaagaaaatccaagaagccgcgatggaggagttcgccgaaaagggctttcacggcgcctctctgcggcagatcgtgaagcaggccggggtaaccaccggcgccttttacggttacttttccagcaaggaggcactgtttgcctctatcgtagagccccatgccgccgccctgatgggcaggttcatggcggcgcagatctcctttgccgagctgcccgagcaggaccagccggcgcgcatgggcgaggaatccggcgcctatatccattggatgctggattatatctgcctgcaccgcgagcctgtaaagctgctgctgggccgctcggagggcacaagctacgagaatttcgtccacaatatggtggaggtcgaggtcgaatccaccctgcagtatatcgaggtgctccgccgtttggggcagaatgtgccggaggtggaccggcagatgtgccacatcctcgcgagcggcatgttcagcggtatttttgaggtggtcgtccacgacatgccctacgagcaggcggttcgctatgtggagcagcttcgggcattctacacagccggctgggcgcggctgatgacgccgtgacggccggcagactgcgctctgtcccgcggcggacagagcgcctgcgtgcgcccccctatttttttgcaaacaggttagtcttagctaacttgttgatatttatgatggacagcagcccggccgaaaaccgggctgccagccaaagcaaattgtaataggaggtaatccaatgaaaaaagaaaagaagagcgacctcgcggttttgctcggctatgcgggcagccacaagggcctgacctttttggggctggctctgtcagcggtgtccatgctgctgagcatggcgccttacatctgcatctggctcgcggcccgggacctgatcgccgtcgcgccggcgtggacgcaggcgcaaaacgtcacccaatacgggtggctggcgttcgcctttgcggtaggcggcattgtgatctatttcgcgggcctgatgtgcacccatcttgcggcgttccgcacggcgtccaacatccgcaagcagggcgtcgcccacgtgatgcgggccccgctcggcttcttcgacgccaacgcctccggcctgatccgcggccggcttgacgcggcggccgccgacactgaaacgctgcttgcccacaacctcgcggatattgtgggcacaatcgtccttttcatcaccatgctggcgctgatgttcgtctttgactggcggatgggcgcggcctgcctgctggcagcggtgatctcggtgcttgcaatgggcttcatgatgggcggcaaaaacgcccatctgatggcggcgtatcaggccgcgcaggaccgcatgaccaaggcgggcaccgagtatgtccgcggtatcccggtcgtgaagatcttccagcagacggtgtattcctttaaggcgtttcagcaggccatcgaggagtacagcagcaaggccgagcactaccagtcgaaagtgtgccgggttccacagtcggtcaatctgacctttacggagggcgcgttcgtgttcctcgttcccgccgcgctgtttctggcgcccggcgctctggccagcggcgattttgccggctttgtcacaaatttcgctttctacgcgatattctccgccatcatctccacggcgctcgccaagatcatgtttgccgcctccggcatgatgctggccggcacggcgctgggccgcatcagcaaggtcatggaagcgcccacgctgaaggcgcccgagcacccgctggcaccgaagggcaaccgggtggaattcaaggatgtgagctttacctatgacggcgcggaagtgcccgccctctcccatgtttccttcacggcggaaccgggccagaccgtggcgctggtagggccttccggaggcggcaagaccaccgcggccagcctgatcccccgcttctgggacgcgacctcgggcacggtggaggtcggcggcgtagacgtgacccgcatcgatccccacgtgctcatggatcaggtggccttcgtctttcagaacaaccgcctgtttaagacctctattcttgagaatgtgcgcgtcgcccgccccgaagccacgcgggaacaggtgctcgccgcgctgacggccgcccagtgcggcgacattctggaaaagctgccggacggcatcgacacacagatcggcgccgagggcacctacctttccggcggcgagcagcagcgcatcgcgctggcccgcgcgatcctcaaggatgcccccatcatcgtactggacgaggccaccgcctttgccgacccggaaaacgaagtgctgatccagaaagcctttgccgcgctgactcgtggccgaaccgtcattatgatcgcccaccgcctttccaccgtcgttggcgcagataagatcctcgtactggaggccgggcgcatcgccgagcagggcacacacgcggcgctcaccgcagcaggcgggctgtatgcgcggatgtgggccgattataaccgcgcggtccagtggaagatcaccagcgaaaaggaggtaaagtaagtgttcagcaagaagtttcagcggaaatacgccctgaccgatcagggcgtgcgcaacacgaaaaagggcgcattctggacggtcatcgtcaatctgatcgtcatgggcggcgccagcgtcctgtatataatgatgtccggctttatggataccctgacggacggttctcccctgcccagcgcagtgctcgccgtcgggatggtgatgctgttcgtcgtcctctcgctcgcgacccacctgcagcagtatgaggccacctacggactggtgtacaacgaagtcaaggcgacgcgcctcagccttgcggagcggctgcgcaagctgcctctgggctacttcggcaagcgcgatctggccgatctgaccgagactttgatgcgcgacgtcaacagcatggagcacgtctggtcccatgtgctcgggtatctgtacggctcttacatctccacggcgatcatcgctgtctgcctgctcgtgtacgactggaggctggcaatcgcctgcctttggggcgtcccggttgcctttgggctgctgttcggcagccgcaagatcagcagccgcagcgccgaacggacgaaaaaggccgcggttgccgtttcggacggcattcaggaggcgctggaaaacgtgcgggagatccgcgccaccaatcaggaggagcgatatctcgaagggctgaaccggaaaatcgacgagcacgagcggatcatgatccgcgccgagctcggcactggaatctttgtcaatgccgccagtgtgatcatgcgcctcggcgtagcgaccaccatccttacgggagccggcctgatcctttccgggcacatcgattttatgatcctgttcctgttcctgctggtcatcacgcggatttacgcgccctttgaccagagcctcgcgctcatcgcggaaatattcgtctctcaggtatccgccaaccgcatgctggagatctacgacaccccggccgcggagggcaccgagaccttcgcccccaaggggcacgacatcgtattcgagcacgtcggtttcgcctacgaccaaaaggaagttctgcgcgacgtgagcttcaccgccaaggaaggcgagatcacggcgctggtcggtccatccggctccggcaagagcacctgcgcgcggcttgccgcaaggctgtgggacgtcacccgcggcgcggtcaaggtcggcggcgtcgatatctccaccgtggacccggaggtgcttctcaccgattactccatggtgtttcaagacgtcgtcctgtttgacgacacggtgatggagaacatccgcctcggcaagcacggcgccaccgacgccgaagtgctcgccgcagccaaggctgcaaactgcgatgagttcgcgcaaaaactgcccgcaggctacaacacgcccatcggcgaaaacggcgccaagctctccggcggcgagcggcagcggatctcgatcgcccgggcgctcttgaaagacgccccgatcgtcctgctggacgaggccaccgccagcttggatgtggaaaacgaaaccaaagtgcagggcgcgctttcccgcctgctttccggcaagaccgttctggtgatcgcccaccggatgcgcactgtcgaagcggccgataagatcgtcgtgctggccgacggccgcgtcgcagaggagggcgcgccggcagagctgatggcaaagggcgggctctaccgccgcatggtcgagctgcagcagcaaagcgcccggtggagcttggagtaaaaaactactgtgcgctgtatcggaacgccgttccgcatgcattcggtgcagcacataaaaagcggggcgcagcatttttcgctgtgccccgcttcgatcatatgcggatattaccccagcttccagccgacagcctctctgcgggccgtgaggaaatccctgtacaggccggactgttccgccagtttcggatgcgtccccttttgcacgatccgcccttgcgccgccacgagaatctggtcgttcagcgcctccacacatatctcccgaatatcctgcccgccgattttgaccgcgccgcccgtcacatcgtaataatgcaccagtagcttggacagcgtcggtttgccgctgccggatttccccacaagcgcggtaaggctaggaggattgtacgaggaggaacgcgaatgaacaattctgttttaaagaaaacggcagcaatttttgcgaaaacaccgcttctaacagcgaaaaaataagggttaccctcggcttattaagggattattctgaccttacgcccactgttggtggtcatacgattgaggatcgcttgagggaagcggagcaacactctgtgaattactccgcaagagaggaaaaacgaggctctcctcccctgcctattagtgctatgaaaaagcccccccttttcagaagtgaagtgataaaataatggtagacacaaaagtgcctaccattatttttatgctattatagacatggaggtggcaatatggctggtaaatacacgatgcgaagcaaagaagaaaagttagctattgtaaagaggaatttagcaggagaaacttcaaggtcgctcgaaagagaaacaggatgcagtcatcggttaatacaagagtggaccagaaagtatctagcagaaggtgaagccgggctggaagttaagaagaaacccgggaatcctttatctcgttatgagcgccggaaggaactgacctacgaggagcagctgcaataccagatcgaactgctgaagcgagagctggttaagaaagaggcggaggtacttcgtttaaaaaaacggaacgaacgaaaagggggcgatgcccgaaaaagatgatccgagagatgtatgctgagattcaaaagcagacagacaaacattctgtcagcgaactttgcgaaatctacggtgtttctcgcagcggctactacaagtggttgaagcgagcaggacagttaaaccggtatgagaaaacacataaaatactggatagttatgtcctggacatccattcccaccacccaatgatgggataccgccagatcagggataagctgtaccttgaattcggttggatcgtcagtgatcctactgtttggaagtcaatgaagcgactgagaattcacggatacaccaggcgcaggaaagctgcggccacaggaaccaacttagaacacatccgctatgccaacgtactgaacagaaaattcaaagcagagaagccgatgcagaagattgtgacggatgttacttatatcaaacataacggcaagtggtattatcttgcaggctatttggatctgttcaacaacgagattctggaatgggaactcagcgatacttttgacaatttcctcgttatgaagccggcagagcgccttctgaaaagaaaaatgagcaccgaacaccaaatccttttgcacagcgaccaaggtgtccagtactcatccgcaggttattgtaacctgcttaaagaatacaatgtaattcaaagtatgtcaagggccggaaaccctcgcgataacgcagttatggaaagcttttgggggcgattcaaggacacgctgcgcaagcacttccgttactgggaatgtgatgatctgagatctaccattgagcaggcaatctactatttcaacaatgaacgacccgtccgcaaactaaaaggaaaaccaccagtcccgtatagaacagaactggtggcataagaaattttatgtctactaactattgactacttcacttttcagaagcgaggaaaaactcttttcaaaagatggcgtatagggattcaaattcgaacgctcgcccgagacggcaattatcggcagcaggtattgtccgatatggcgctgttacatctgtaaagaaggatagcacaaaccggttgatttcttcccgtgtcgaaggctttaaatggatgtaaatgcaaagatgagcgaggcggcctatgggattgtaggccgcctcgctctctcatgaggattacaccttattttccggaatctctactgcgatcagcagatcttccggcttgcagttcagacaatctgcgagggcgtacagatttgccacagaaatattggtgtttttccggcaccaatttcggacctgccgctccgagcaccggcatcattccgcgatctcactctgcgctttaccgctcgtgcagattttcgagcgcacctttacggcactgagatacatcacggttttcggtccgttccgctccatcggaatcacctcctcttatgcctttagcataagaggaaatggatttcccataaaggaattttacttcctaaatttggaaaatttaaacatgttaatctcgcatgttacgatgtgtatttttttgtgtattgtacagaaccacatacgattttaaggacaggcctctctgcccttattgcctctattcccctcatatttttagaaatgtcaggcgctgattttggcgatacattccaacaggccgtacgcatcttcggcggataccgtgaaaaatatcgcctaatttttgttctgtaatacgcatacgactttcgtattgcggtacggtaagcgctatgaaattatcccatgccgagccggcagccgggggctgaatccgcacattttcaatgccgaaaacacggataataggaattccgccttttcacggcgtatacccgcttattgaacaaacaatatttttactggcataacaaataaatccgaacccattgccaatcggcacaaggttcggatttattcgttttggtggagatggacgggatcgaaccgttgacctcttgaatgccattcaagcgcgcagtactgttactacagcagatgtccgtcacaacacttttatttctcgccaaaaaccggaagtacttccggttttttatattacccgcaaatgcggagactgtataaggaggacataaaaatgtctatcaaaatcgcaatcacaaatgaaaagggcggctgcggaaaaaccatgagcgctgtcaacatctcggctatactggccgaacgcggataccgcgtactgcttgtagacgccgacccgcagggttacagcaccatgtactacggcctatacgatccatctctcccctccctctttgaagtgatgttcttcggagagaatccggagcaagccatcagcactactgcgttcggcgtcgatgtcctgcgatcgtccactgcccttatggacgccgaggagctgctcgatcagcgcaaactcaacgggcttcgctataacgacctttttgtgaatgcactttccgcactggaaagccggtacgactacatcttgatcgactgcccgccgcagggctacaagctgcttgaaaacatccagctctatgcccggttccttttgatccccatgatcgccgatgaattcgcgctgcacagcctgcgtctcaaggctgagaaaatcatcgagattagaagaaccgtgaacccccagctccagctgctcggcggcttaatcgtcatggacgagaaaaataaaaccacgggcatctatcgagaggcacttcaatcacaggacattcttcccttcttccgcgcgaccgtccgcaaaaatatcgccctccggcgatctgtaaacgcacgcgaacctatcaatgtttatgataagagaagcaacgggaatctggattatcaggccgtcgtggacgagttgatcgggagggctgcaaaatgaaaaaactgaatcttggaaacatctcagccggattggatacactcaaggggctgcaagagcagaacgccagcgtcgcgcgcaatgagcagattaaggccgagcttattgatctggcagaaaaaaactcgtatgcggcagacgacacagaagaaagcatccgcgatcttgccgatcagatcgaagaactcggcctgctcaacccgcttggtgtggtcgagcaccacggccggtacacgctcttttcgggcgaacgccggtataaagcaatcacacaacatttacactgggaaacgattccctgccgtgtatttgagggcgtatccaccgggcgcgcgcagctcatgctgcatatagccaacggcgcccgagactacagcccggcccgaaaactcgcactgtacgaggagtatcaccagcttcttgaggagctgaaagccaacggcgaatttaagggcggtatccagaaaggcatcgccgagttgcttaacgtctccgaccggcaggttcggacatatcgcaccatgtccgagacgctaacagcctccgagaaacaagctgtacaaaacggcgacatgagcttcggagaggcacagtccattgccgccagccgtgccgctgcttcaaatgtgaaaatggaaaaaagcggaagtacttccgcttttgcaccgaaaccagctccggctgtacagcaggaaaagcctatggctgaatatcatcccgctacaggtaaagaggtaaaaaccggaagtacttccggtttttacgaagaagcagctgtacaggaacccgacgagaacgccagagctcaactgctcgaagcggccattctttcaaatagcatctggaactgccgcgaactgcactcctactatgtcaagcacatgccaacacctcaagaggcatgcaaggataaattaaagcctacatacggacattcatgcggatcgctgactatagataatttcgatggcttctacacctgtacttccagccgtttcatcatggagccggacaccggcccgtatatcacatacacgtatgccgaagtggacgccatgatccgcaaactctaccgagaaaagaagctgaactgagaggcactcaatgaaaatatcaaaagtcatcattcagccgctcaccggggcatccggcgggcggctgctcgcttttgcgagcttgatcgtcgagcagcgctacgcaataaacggtctgcgtattgttcgcagcagcagcggtaagctggacgttttgtatcccgcaatgcacgcccctaaccgccacagctcccgcaccggacgcctgtacgcatttgtgccaatgaacgccgacgcacaccagcaaatccgagatgccgtcataaacagctatgcagccgaacagaacaatacacattgattttgaagaaagcatcaaatctgaagaagacaggatcagcccatgaaaattattaaattcctgctgaagcatattcgacgccgcatatatctttggaaggtcgattacatttactacagttgctttgtcatcgaagaagggatgccgccctcgtattacttaacgcacactcaagaggaaatcgagcgtgacaggcaggatacccttgctgcgatcgaccggctgatacagattgacaaaaaccggaagtaattccggtttttgtcctctctagtctccgctacggagcttttcacacaggcatggatgccgtttccgatcaaaaagcggaagtacttccgcttttacagtaaattcaagctgaaataagcagaaggagaattcatgttaaagtactatgctcccggttcaggcaataatgagcacaccatccgcattacctttatggttgacgattatgtcgggcacgttgcctttattatgggtgggaattgcaggggctctgccctactaaaagccgattttctcgaatttgatacacaagaagatattgatctgtacactgagaatgactatgcatttacatatcatcccgatgatgatatgtacagtgctatacttaaaaattcagatggcgacacattgtgtatagatggtgatgagagagagtttcaggacgcagttgtagcgatcgagtataccgacgtcaaagtatgcgagtcaaaaagcggaagtacttccgctttttgacgatttcagtatcgcaaagcacaaaacaaccgcaccgattattaaggaggaatttcaatgtctaatatccgattttgttctgcggctcaccgtgatttctttctggaaatggtgagcaaaagcagggtcaatgactgctatcacagagcctttttctatgtaatgggcattgcaagagaaccaagacaaaacattaaccagatgtttgattttaagcaggactgtatcaaaccggagggtatgcacggaggctggcagaccagcggcaccgtccgggtgtgccgtttggccttcaacctctggaacggctacaccgaaccggaacacagcaacgcctattccccggaagatctgttctgctgtgaatttgccccctatttcatggagggcattaaggtcagatacccagagtattgcagggagttccctgcacccgaacagcaagagtaaaataaaaagtagacttttttctgcttcaaggttataatgaaagtgattgaaaaagcaagctttttcgttcacacatatgttttcctgcaattgaaaaattttcaacagaggatgttaaaaggatggctgataaatggatgaaataactcttgaaaaactacacatgttatgtcatgacgatacaattcgcatgacacaacacatggccttacggtgtcgcgagcgaaggatacggtataacgatataaaaaacgccatcataacaggagaaatcattgaaaactacccagacgattatccgcagccaagctgcctagttttaggtgatactctgaatggcatgccgattcacgttgttgccggtgtcagtgatgaagcgctatggttaatcaccgcctattatccggatcgcgatatgtgggaagccgatctgaaaactagaaaggaacattgactatgaaatgctttgtgtgtaaaggtgaagctgttacgagtacaacaaatcatgttgtcacactggacaacggctgtatcgtgattgtaaaaaatgtaccgtgtctgcgctgcaaacagtgtggagaaacatggtatactggtacggtagcagctcgtcttgaaacgattgtagatactttggagaattgtctcacagagattgccgttgtgaaatatcccggacaggttgcatgatgtgagatcgagctggagcgtaaaaagcggaagtacttccgctttttacgtgttgggagtttagaaggaaatttgcaatgaacatggtctatgtacccgataaagaaactgtgaccgcccgcttcgtcaccggcgaaatgtttattctcgcaatcacctatgatgaggaaaccgctgcgatcgcgccgattgacgaagccccggagcactacattctgctcaataaagccggtatcggcgaaatcaacctcgaccgatgcttccgcgtcatattcgacgacaaggccgccgagtggacgttcgtctgcccctccgattacgcgcatatctctgacaggcaaaagaggatcgcacagttctacaaggacggattccgcacgatcccgcatgtgctctccgatcttggctatatgatcgacctcacgatcagacgtaatcgcgtggaagattccatcgaaatgcaaggctcagacaagctatacagggatgcctatgccgaagcactggccgcaggacacgacgcaatttatgcggattcctatgctaccattcttacatatacaaatgagttcccgagcaaagactatgctacactgtacgctaaatcctacgccgatgcgtatcgcgaatgctactcagaatacaatagtaacataggagccgatgtatttgcagaggggtttgccaaaggttatgttgaatcccaaatcaatcgtattcgcacactcatgcaagatctggatatgactttcgatcaggttgctgaaacactttgcatatcagacgatgaccgcccacattattttaatctcttttttcagcgaggagatcaaaaaatgacaggacgagaagacaaaaaagaaaacgatcttttttatacttgcagcttaatcgattatatcgcgcgtaaaaccaagaaccggcgcgctgctattgtcaatgcgctcggtaaagatcgtctgacaaaaatttacgatctagcggacatctatcacagtgataacatcgatcgcgtgagcgatgattttattaaggtagcgggtatactccccggtacattcgttaatgtggccgacgccaaatatgccgttccgagccattgggacattggcaaggtgtacaagcgtttgatccttggaatcgctaaagagcgcggtatcgatgtaattgatgcgctgattgccgcgtacaattcttttgtaagcgacaagatcgacgactacaacagcagcttctactacgataatccgcagagcattctgcaaacctttttgagcggaaagctcgaatagcgaaatatcgatatataaggaacaggcgatggaaaaccatcgcctgttttcatttcacccaaaaagcggaagtacttccgcttttaatctttcataggaggaatttttatgagtttcaatcaatacgcaacgattatcgcttatatcgatgatcttgcgatctgcgaagacgacttcggggatctctggtacgcagacatccccgaatcctgcgcagagcccggcgcagctatcgaaatccaaatcctgcacaggctgaatgagctgcctgattccgatcagcaaagcatcttgaggcagatcgacgcgcagacttctcaagccggaggtgtttgatatgcggaaatacttttcacaggaagaacgcgacgcctacaatgcgcagaaacgtgaggaagccaatcagcagattgttgatctggcaaaaacatggcaggacaatcccgaggacgtcgcggaattcattcgctttcaaagcagatttcaccactactcagcgcgcaataagttgttgatctacaagcaaaacccgtatgcgagcttcgtcgccagtatggccgatttcaacgaaatgggctactgggtgcgtcgcggacagcacggaatgagtatttccgtgtatatgcctgtcacgacgttccgcacgaagccctctgcgccgtggcgttcgatccggacggccagcgctcaagaaaaagaaatgattaaagccggtatgcttgaaacacacgaggagccgcactttggaaccggcagtgtttacgatatttctcagacgacctgcccgctgtccgattatccgaagctgcttggcctaggctatgattccgcgcagcacgccgcaatttacaaagaaatcaagcgctactgtgagaacatcggcattcaggtcaaggaacaggatgtagattccgtgacacttcgcggcttttatgacccgcgcacacgtcatatcacgatcaatgacaagctgggagatacgcaaaagctctccacgctgatccatgagatgtcgcatgatcttatcggccatagcccggattcccaaaaatcttcggcacagagagaatttgagtcagacgcgctttctatgatgttggagcagcaatatggtattccgacaacggatgtgcggaaaagccaccttgccgactgctacgcagcttactgcaaggagctgcaaaatacgcagaagccgattgaaatcgataagctctttgagccggtcaacgacacctttaaccggcatgtcaggaacttggagcagtatcttcaggcggcggaaatcctccaaaagccgcaggagctcttgatctacagcgtgcgcactatcgagcaggacaaggccgtgattacggaaggctttgattcgctggatgcggctgtcggtcatatccggcaaatggccgaaaacagcgatgcagcactcaaagcaaacgcaacaatcgagagctggagaatcctttcggatcagacacagtttgaaatatcggcggccggaaaggccattgcaaattacgaatacagccagagcaccggcctgcacatcgcaaattctgctcaggaatccggtttggagcgcacgcctgcaagtcacgaaaacgattttcagatgctcgatcggctgcattcggacgctgaaatgtcatcaaattccgaggtgcagacagcagcaagcaatccttcggtcaccgcaaccgagatgatcgaagaagattatgaggaagatttcgagatagaactgagctaaaaaacggaagtagttccggtttcaacgctaaacagaaaggagcagcacgatgcgggttgtatttttagagccgggcaaagaagcctatgtggatgaaatcgattcctcgctcgaggcgatgcaagcagcggtcggcggctatattgagccaatctacggctttccagaggatgagaacctttgcattatcggaaatgaagaagcaaaggtggaggaagattggagagtttcgcgagctctgcgagacgaggccggaaatatttacgatgtcttggcagggagagcttttgtttgcgcagtagacgacgaaaattttattggactgaacgacgaccaaattcagactatcatggcgagttaccgataccctgagcatgtcctgatgacatcctcggggttggttgccctgccctatccagagccagaaatagacgcagaatttgaaatggatttcgagtaaaaccggaaccagttccggtttttggaggcgaaatatgaacatcatcctattcgatcagacggaagcataccggcaaattgaatctggtctgcggtgtccggtatgcggcgatcagatggaggttgtgcagcacggcgggcgctggtttttggagtgccaaagctgcgtgaccgtcttcggcggcttctccggcacagcatccggcggctttttgagtcgtcaggaggcgatcgaagcatacctgtgcgcttacagaacgcgacaaaaatagaggaggaatttcagtgtctgaaacagaatttacaattcgaatgctgcttatcatctttacttctgtcgcggtatctttaccgctcacgatttatataaacaaaaagctgatgaaacgggcggaaaagcacattgatgaagcagtcgatacagagctgaaaaagcgaatgaaatgaaattttgaggaggcttgatctatggccagccctacgctggtagcaaaactcgcgatcaccttcagtgatccgaagctctgggaaaaggttgtcgtgatctgcatcgccgtttttttgctctctacagcactgctcggcagctgcggcgcaatgacttataccgatcttggcttcaatgtatcggagcttttctccgcacagatcaacgagttcaatgcgatttttgaatctggagagcgcataaacgacaagctcttgtatgcgatatacgccaagctctttgcagaaaacgacaagctgaaaggccagatcgaacggcttctcgactgctttgtgacggacgataagctctcccctctgtcggattccgatgcgattttcgataaaatcgaggcgactttcgggctttccgtaaacgcgtatatgcgcacacagatcgagcgcttatcgacgcaaatgccgtccggatatgaggatcgcgcgatccttcttcggaatctcgacagtgaagacggaaaaaccaacattggccttatcaatttttgcatgaacgcgctggaagccggttccggatatgtctacggagcctacgggcaggatgtaacgatggcatttctgcgtcagcagcagtccatgttccgcaccgatccgtctgcaaatttaacggattccgaagtgaattttatctttgagacgtacagcggaaagccttctttcgactgcatcgggctcataaaagcctacgaatggatcgatgaagacaccggtgtgatccgctacaggtcaaatggttttcaagatattggcgcaaacggcatgctggaaagcgcggaaatctccggcgatattgcttccattccggaaattccgggccttgccgtctgcatggaaggccacatcggcgtgtatatcggcaacggcgaagtgatcgaagcgaaaggaaatcacgacggcgtagtcaagacaaatctctccgaaggaggctggacacgctggatgcagctgcccggaatcacctatttgaccgatggaacgcacccatacggaaccaaaaaagtggtgctggaaaacggaagaatcaaggaaattacgaccggcgtcgttgctggaaaaggcgactttcaatggcctttgcccgctccatacggcaaggattggatcacagataccgccggtgcccgctggaatccgtatacgcacatgtatgaaaacgcgcatggtgcaatcgatattggagcccctgcgatgacgccgatctacgctgcggcggacggtacagtgaccctatccacgtggcatgactcatacggaaactttgtaaaaatcgatcatggaaacggctgggcgacactttatgcgcatcaaacgcagcgcgcggcggtcgtcggacagcatgtttccgccggagacttgatcggatacgtgggaaccacgggcgattccaccggcaatcacttgcattttgaaatccgttatcaggaaaaccggctcgaccctttgcagttttttgagtagcgcggatgggccgattctgtttttttccttactaataaccgcgtgccggaggcacgcgccgcgcgaaaattttgaagattttgaggtgttttttatggagcaaaatgtgaacggcgtgttcgcatgcgcatttgacgctgaaaaagttaaagcgatgcgtacatatgcggagcagaaaggcatcgatcttgacgcagaaatcactaaggttttggagcgaaaatacatccagatcgtgccgaaacccgtccgtgaatatattgatttcagcaatgcagcgcagccgccgaaacaaaaaaagaagccgaaatccgcagcaaaggacagcgaaatcgacgcggaaacagcgccggtttttgcgtcggatttcgaggaaaacagtgaaaatcctatcgcagaagacgctgaatctgccgcaaattcttcgtttgacagccattctacagcttcggaatatacgagagcacccccactccggagccgtccgagaggcgtttttggtgacatgcagcgcagtgcgcggatcactgcctcgagcctctgaaaatggccccaaaaggtgcattttcagaatgcaggataaagcagtagcaccaccttgcggtgctactgcctcacaaacccgcacggtgtgcgggttttctgcgaaaaaacggtagcaccacttttttgccggtagaaccaccttacgtaccaccttttaaaaaaagtgctgcttttcatagctctcaagccattatcaggtggaaccagaagtggcactactccgaactactcagcaaaggaagtatacaatggcaaccgaaaaaaatagagtgtctgcttatctttccgacgaagaaacaaagaagctggatgcgattgttaatctgcttaacctatctcctacccttggccgcagctctgcaatcgaaaaagcaatcgatttctatttcagttttttaagcagtcaactcagtacagattatctatgtggagtttatggaaagcaaatggaagcaatcgcgaatagtgctgtttcacggttgaactctctgcttttcaaacaagctgtagaaacaaatcttcttacacgaattatcgcggtggattatgatttgtcaaaagacgaatacgataagatgcgcggcaaggccgttgaagctgtcaagaagtcgaacgggcgctttactctgctcgacataacaaatgaaatggcaggcgagtaaatccaaatagacttttctctttagatgtgctatactaaaattattgattatatcttttgcttatggagggaaaatgatatgcctgagtttattatcattgcgggaataaatggaactggaaaatccagtcttcgtggtgtgctcggcgaatacaaaaatcttggatacattattgatcccgaccaaatcgcaagagagcatgatgcagatataattgccgccggaaaaattgcggtacaaacgattgacgattgtattcatcgggaaatcactttcacgcaggagactacacttgccggaacccgcattgtcaaagaaatgcagcaggcaaaagaattaggcttcaagatttcaatgttctatgtcggacttgaaagtctcggcgaaagtctttctcgaattgccaaccgtgttcagaagggtgggcatggaattccggaagaacacgtgattcgcagatatgaaaaacgtatcagtgattttcagaagtgtgtcccctattgcgatgaaatcgttttctacgataaccaaaacggatttatcaaggtggccgaatacaggaaagaaaacggattccaatttacgaacgggcatcgtcccaaatggcttgaaccattgagagcaacactcatgtaaaaagcggaagtacttccgcttttcagggagggtaacatgaaatacactttgatgcacaaaaacataccggttcttgaaatggtattggacgacgcttcatgtgcgattttacaagtaactgagatataccatgccgcgcatgtcccgatcggtatttcaatgcggaacggtgtcatcgaccgctccgcgctaaacgtctggtggcgcggccgttctattccggccagtcgtcaaggaatccgacaggctctcgaaacgcttcgtatcggatacacgcagcagcttcttgaaaaaagctacggcctcagcttatccgatcaatattggattcgcgccgagcattccgatttacagtggtcagacatcaacttctttcagaacggattctccgatgatgtaggcgacattctatttggaaaaaagctctccagcaacgaggggatcaatctgatgtctccggacaacacctcggatggatggctcaagaaaaagtggacaatcgtgaacggcaaacgatgcctgataaaaggcggcagtggtgccacgcagcaggagccttacaacgagattatcgcatcacatctgatggaacgccttcatataccgcatgtcctctatcagattatcgtacagaatgattatccctatagtatttgtgaggacttcataacatcggacacggagcttgttccggcatggtacatcatgcagacacaaaaaaaagaaaaccaccattccaattatcagcattacctgaaatgctgtgctgatctcggtattcctgatctgcgtcacgaattagatcaaatgctggtgattgattttcttcttgtaaacgaagatcgtcatttcaataatttcggcatcatccgcaatgctgaaacactggattggattggagccgcaccgatctacgataccggcacagctctttggttttctacgcctacaaagctcatccaccccgccgcagtaaaccttccctcaaaaccgttccgagatacacacagagagcagatcaaactggtttcctctttggattggatcgattttgatgccctccaaggctttggagaggaagttcgatctttgctggcagattccttgttcatcgacagcgaacgcagccatgtattagcagaggctatcgaggaacgtatcgagatgctgcgtagaggctcataaacaaaacccaatacatctttgtcaaggatacagaaattattctgtatcctttttgttttccacagtaagtaaaaagcggaagtacttccgctttcctattaaagcgaacataaaacgatattggaggcaataaaatgccagacgaactcccaactgtccttgatgttgtaatacttttgctgatagcttgcgctgcactcgttgcgttgagtgacattatattttctttttggaatcgacggcaccaacagtatctcgatgaaatcgaaaaagatctacaggtgctttcagaaaaaagcgatgaaatggacaagacgtatcaagaaatcatgaaatccattgaatcacagcatgcggcgttgctcgataaagtaaccgaagaacttacacagttggaactcggagttaattttctcactgcaagcacacgccagtcttctgctttatctaatttgctatctgaacaaatacattctctgtctgaatacactgcgaatctctccaaagacaataattcaaaggctgaaatacaaactgcaattttagaatcacacacagaatttacgggaggcgaagcgaatgaaaaagcaaatgtccaattcgatcgcttttgctaaaggcgttgaggttggaatacacgaggtagaaaacctgtatgcttctatccaaaagcagcgcgtcatagaaggcatgattgccgctaaaaaacgaggcgtccgttttggacgtcctccgaaaccacggccgaaggaattcgaacagttcaaggccgcatggctcgatggcaagctctcatcaaaaaaagcagcgaaaatgatcggtatttcgcaggacacttttttgaggtgggctcgtgatacatctacgcaggaaatgaccgtcgaagaagcactgcaaattctgggcgactttaggaaagcgcttgtcaacaatcccagtgtatgttccgacgtacaagataaagcactgctcaccgaagcaatcaataccatagagcagtatattgtccaaaggaaaaatgccgcagcaaggaaaaacatgaagtctgtatttcaagaaattgctgaaagaatggccgaatagatcattatttacgcgaggtgcgattatggcggataagcggaaggatatggtagctggcgtagattggctcctcaaaaaattcagtaaatacagcgactatagggagttcactgttgaggagatcattagagcctctaatgaggcggtaaaggagattttaacagaggtcgagaagtaaagcgcacattggaaaagaaattgaaagaaggaaccgatgttgatacactaaactaaaataattattccatttattctgatttcttattgaaattgaaccgcacttaaaatataataaaggagaaattcatgtggttatttacacttatcggagcgattgatgtgtttactttcatagcggataaactgttctccatactaaaaaacaagaagaacctatgcctattctttataaatttattgatgggtattgcttttcttctaatgggcgcgttattttatttgtccataaaaaccatgctgacatatttagcaaacattattcctcaattctctatgttggcatcttttcagccttacatcttgatcttgttcgttatccttattcaaatcttccttgcaatatatgtattttataaattaaagaaacatttctgtctgccgttaatagaaactattccaaacgaaaggcttaaacgctgtttgatgccttcgtttaagcagcttctttcctgcggtttccttttgggcaatggattcggtttttggttattaaccatttgtaaggaaatcaccgtgaattccagtttgctttatttgctactggttgctcttgttattatgtggtttggacttgaaattatatttacgatcaattttttggaaagcattcgagtcctcagattatcccaactgtattccgatccggattttcaagaacggattaaagttcaaaatgctgatggcttcttcattgtatctaccaaggacaagcagagcaactcttttcgactcgatgtagacttaggaatctataatccaatcgaaaaagaggataatcgatctgtttccgctatccgtcctttttctctccaagtacttaaagaattccgtgaattggaggaaaatgcgaaagccaaagatagaaaatagtccaagaaacatttccataatagttttcattgaaaatattgtaaaaatcacttttaaaaaggccgcttcagcggtcttttttcttgacacaaattcgatttaagtctatatttaattagggggaagttactatgaaggaaaaattcaacaacctgagcaaaaagaaaaagcagatcatcggccttgtagccggtgtgatcgtcgcggcggcgctgcttgtcggcggaatggtagcctgcggatcggctgcatcgactgaaagcgaaccgacggcctcgccgtcggccagcgcatcggcaaagccgtccgcaagccctaaagcggatgaaaaggataaggacaaggccagcccctcggcgaagccgtcggcctctccgaaagcatcggcaaaaccggatgcggataaggataaagacggcaagacggaatccagcaagagcgaatcgagcaaatccgacgacaacaagaagaaagacgatgagggcagcagctccaagccgtcctcgacggctacgaaaaagccttcggccacaaagaagcctaccgctacggaaaagccgtcgagcggaagctcgtctaagccgagcaccggcggttcttcatccaagccgactgcaaagcccaccgcaaaaccgacggagaagccctcatccggcagcagttctggcggcagcaccacagtaaaaccgaccgagaagcccgctgcgacagcaaagcctacggcgaaacctactgcaaagcccacagcgaagccgacaccagctccgacgcctgcgcctacaccggcccccacgcccgctcctaccccggaaccgacgccggaaccagttccggaggaaccgtatatcactggcggatacattagtgatgggttgtttgatagttcttatgatgccgcggtgtatgctgagtcggtgtggggcgataagatcattaacgagggaataactggttattacatcctagatgtatattattctgatggtagcacaaaatacactgtcgaatggtattgataacgcagacgggatgactgatatctcatccctgatagaggctctgaacacctaaaaatacatttgctctggaaaactgaataccgtacaaaaagaggattgactttatcagtcctcttttttcgtgcaatcaaggccgcacaagattgtgcggcctttttatatagataaaactcagaggaaaggaaatggcaaaaatgagaagaatacgaaagcctctcgcatgggcgctgtccgtaatgctaattttttcagcattaccattaacagcgtttgcggatgaggcgataccagcagacagtatgccgacaacagaggacgtgcttgggccaatgctggatgatacgccgttgccaacgccggagccgacaccggagataacgattgaaccgacaccggagccaactccagaggcaacgccggaaccgatgccggaggcaacgaccgaacctacaccggaaccgagttccgctccggaggatacatcggaaccaacagaagcacctacggcaacaccggagccaactgcttccccctctgctgctcctacccctgcgcctacacccacgccggtgcctgccgaagatccttacgtgccgggcttcaccgtgatcgaatcggaacttggtggcgcgcacgcttggcctgtgccggagcactttgatgtcacgcagggctgcggcgaccagcatgcggcgcttgacattgccgcggataccggcacaccggtcgtcgccgcagacgatggcacagtcaccataacgcagacgtggaacggcatcgtgacgaagggagacagcaattcctacggcaacatggtgcaggtcacgcacgcggacggcaccgtgacgctctacgcacacctttcggaaatcaatgtccggcagggcgatacggtcgtgcgcggacaacagatcggccgcgtcggcagcaccggcaactcaagcggcccgcacctgcacttcgaggtgcgctcaaacggcagcaaggtcgatcccatggcgtatatcacagaggacagcacagacgctgagaagcgatttgaagaacttctcgagcagtacggcggctgtatcggcgaggacggccagcttcacacgatcgacagccgcgaggccatcgataaaacgctcgccgagatcgccgaagaagccgggctgaatctccccgttttctatgcgaacaatgttaccgttaccgaatcccgctcgacctatataatgaacatcggctatgtcaccgatgtagaaggggctacaaatggctggggcggcaagcgcattaacggtaaggttgcctactgtgtcgagcacggcatagctttggggttaggcgataacagcggctatacgcaacaggatttgacaaaggagcaaatgaacaggctaacactcatcgattactggggccgctataaaaatgttgccaatgtcaaagggtgcagcgccgtaaactacaactgggatacgattgacgtgtcggctgaatacatggcggaattttattgccagctcctgatttgggaaaccattaacagctttggcggcagcttcgtcggcgcatccagcgtctctattcccagtacagttggcggtatggacaatatcgcttctcagtctacctacaatgcctttaaaaaggctgtcatggaaaaggtcaacctgttttatacaacacccagtattaccggtcagactgtaacaatgaaaattggagaaacagttaccttaaatgatacaaccggtgctttagccagttacagagacactccccttgtaaacaccacgggaatatccgtggcgaagcaaggtaataaggttatactgactgcgactggaaatcctaatcctacaggaattgtatcctttgcctacaatgtggatctcgattattatacagatgaacccggttattattatgaacacgcagtcagtcaggacgttgccacctgcggcttttctggcagagaccctacctctgtaactttcaacgtcaacgtcgaaatgaacggttcgctgaagatcgtcaagacctcggaggacggcaatgtcgctggcgtgcgcttcaacgtcacgggcaacggcgtgaacaccacggtgcagaccggcccggacggcacgatcaccatcccgaatttgcaggacggcactgtgctgaccgtgacggagctcacctccgaccaatacgtgcagccgcagtcgcagacggttacgattaaggccaatgagaccgcgactgtttcctttgcgaacgtcctcaaaaaatggacggccacggtcacgaagcgcgacagctcgaccggtacggcgcagggcgacgcctcgcttgcaggcgcggtctacggtgtgtatcgaggaaatgacctgatcgatcagtacacgaccgacacgaacgggcagttcacgacgaaagagtacgtttgcggcgataactggtacatcaaggaaatcgcgccctcgcccggctatcagctcgacggcacacgctacccggtcggcgcggcgcccggcaaattcaccctcgagcataatcaggtcgccgtctccgtgcacgagcaggtgaagctgaataagatcagcatcacgaagtacgccgacatggtgaacggcgacgacgtgcccgaggagggcgcagtctttgaggtctacctcaagtccgcaggcagctatgccaacgccgacacggccgagcgcgaccgcatcacaacaaatgcctccggctacgcggtcacgaaggacttgcccttcggcacgtatgtgctgcaccagacggctggctgcgacggccgcgagctcgcaccggatcaggaggtgacgatcaccgaggacaagtctgcgcatgcgacctacggcgtttcgatcaccaattccctcaagctcggcggcctcgagattttgaaagcgtccgaagatgggatcatcgagggctgggactttgagatcacccgcgacatcgacgactggtcgctggttgtcacgaccggcgctgacggcagagccgtcgcagagaatcttcccgtgtatgccgacatcgcaggcaagcagcccatccgctacaccgtgacggagatcaacgtcggggataagtacaaacagcccgaaccgcagactgtgacgctcacggagcatgcggtcgtgacggtggacgtcgaaaactggatcgcccggggcagcatccagttgctcaaggtcgatcatgacggcgtgacgccgctcgaaggtgctgtctatcgcttctggtacgaggacggcacagagatcgcgacggagacgacggataaagacggaaagatcacggtcgaaaacatcctgtacggcaagttctactatcaggagcagaccgccccggagggctacgacctcgacgaaacaatctatgaagccgccgtagagcacgacgggcaggttatcaccgtgacccgtgagaacacgccgagcgtcggctcgatcacagtcaccaaggtggataccagcggcaccccgatgtccggcgtctcctttgcccttcaattctcgactgacgacggcgtgacatgggatttcgtcacggcccgcgaggcggacagcaaggtctccatcggcgggtgcgacagccccggtcttgaaaacggcgtcctcacgaccggcgaggacggcattgcggcctttaccggcttgcaggtcaataaccagacggtgacgatcctttaccgtctcacggaagtttccacacaggacggcaatatcctaattggcgacattctctttgaaggcagcctgccggcgagtatcgacggcgagaaggtggccgacgtcacgatcacggcagttaacggccgcaacttcgagctgccgggcgctggcggcggaggcttcccgttccagacggtcggcatcctcctgatcgcggctgcgttctgctcgggatttttcatctacacacagaagggtaagaagatcatgaagaaaatgaaggctctttcgcggctgggcgcggttgtgttggccgtcgcaatgtgctttagtgcggtgacggcttcggccgcatccgtaacggaggcgacaatcgatccggatcgcgcggcgtccctcgagctctacaagtacgatttcacgacggccaacgaggacggcgtgctgacggattcgacgtttgtatccaccggccagcacgacagcgcggtagaagaagcgcttgcgccgtatgccctgcagggcgtcatctacacctacgccaaggtggcggacatcatgacctactcggagcaggagacaaccggctataaagatatggtgctgtatgccctgccggataactcggcatccgctgagttccttgcagcgctcggcttgagccgtgacgacgcctaccgcatcgatcacaacgaattgcagtttatgagcgacacgctgatcgacggccttgccggtcagctcggctccatcgagagccagacgaaaaacgcgctggaagcctatgtccacagcaacggcggcatcgacatgccggagacggacgcctacggccattcctccgtttccgatcttgcacagggcctttacgtcgtcgttgagacctacgtgccggagaacgtcacttccacgacagcgccgttcctcgtctccctgccgacaacgacgaatgacggtgacaactggaattacgacgtcgtgatttaccccaagaatgaaaccggcatgccgacgctcgaaaagacgctgcgcgaggcgcaggccgataccggcaagcataacggcaccacagacgacatcgcggacggctatgcccacaccggcaccggctcggacggcgacgttgtagactaccagatcatctccaccctgccgacgattacctcggatgcgacggcgctcacgacctacacctatgtggacacgctctcgaagggcatcgagtacaacaagcaggatgtgagaatcgaatggtacatggattccgcctgcaagcacaagatcaccgagtggacagaggcggacggcaagtctgacgtcgcctacggtacagccgacaatgacgccacgacgatgaccgtcacaatgaccgaatccggtctcgacgaaatcaacaacagcgacgccgtatacgacctcggcacgagcctttaccgcggctacagcgactgcacgatgcggatcacctacacggcaacggtcaactcgtccgccgatatggtctacggcgacgacggcaatccgaacaccgtcacgctcgagtggcggcgcacaaacatggactactacgatatgctcgaggacgactgccacttctacgcctacggcctcgatctcctcaaggagttcaacgacggcaagggcaatgcagcaaacgtccagttcaagatttggaatgagacggacaaatactgggtacaggcagtcctgaacgaatcggagggcgtctactacgtcacggatcacgtggatgcagaggcggacgccacgacgttcatcccggttgagggtacgcagaagattactgtcaagggtcttgaggacgacgagtacgtattgacggagatcgcgacggacaacaagtatctgcttctgaaagacccgatcacggtaaagatcacgacggcagagaacgacgtaatttgcgctgtgtgcggcaagccgggcctgacagcctcggcgacggtcaacggcgatccggttgccatgaccgaggacaacggttccgtttcggcgatcgtgccgttcaaggtgacgaacgtgcgcgggccggagatgccgaaaaccggcgatcggggcacgtggctgtatgcggcaggcggcacgatgctcgtctcgctggcggcaggcggcattctgatctgcattaagcgccgcaaaaatcagcctgagagtaagtaaagcagcttgaaccggaaccggattccggttttgcgcgcagagtgagaggaaccggcggattgctccgccggttccttgtaatgcgggatcgccggtcacaaccccggcgaggcgcaaagtctatttggaaaggggttcgcataagtgagtaggacattcataaagccgtgaaaaaatgcagccacaaacatattgattataccaaagagtgagttctataatctttgtttgttttttaccttatgcttactgtttcctgaatcttttcctgaagtaccttttttgttatatttacgaatccaataggaaagaaataacggacaatgacttgtaacaaaccaaataattgacataccaactatcacaattgctattggtcctagaagaatagataaagcgaataactcgtatcctatggttaaaagtgcataatacaaataaatccatatcacagccatagaaacagaaacgaatatcgcaagtaaagaaagaaatcgtgcggtatgcacgtcatactttaagcagagcgtagtataccatgtgacacgtggatatcctaaaacttttcgtaaacgattaatttcattctcaatattagttttaagtaaagagtatagttttttacgtttttttaaagctcgttggcgcaaatatacaggcagatcagatatttgagttagcgcctttatttgtttcattttccaataaatctcagggtttatgcaaagatcgttattatctttcgcaataacctcaaacaaacagtcaataacttcttttgcgcaaatggtgttttcttcaattttgttcatcaacgatatatatatttgtaatgatttctcgttgatagaatcttcccttttagatgttaaagattttctatgttcccatatggtaaaagctgatgttacaacaatagttattatcggagaaaaggacaatataaaatcctttatagacacgcatatctccgtgatccaattaaaatctaccataataatcctacctttatataatacatttggagtgatttcaatgaacgaacaaaccgagaatattcgagaaccagcaaatcgtaaaaatgtaccaccatttaaaacagcctacaagattctatttatactggattcgatcagcattgctgcacacatcgtttgcgtagtttttggcatatgcatcgagcaaagaaagcttcttggtatactttttccgttgttagtcttattatggatctttttgtataataaggcgttcggaggtatcggcaacataatccgtagtattttggggagagacttttatcctttttaactcttttcccatcaaaaaactaacgtggataaccgagttgcgcagccatgacagaattttataaaatcgctaagctatccatatggatttcttcgataatgttactatctctaaatgaaaaaagcaagtcaacattttcccggagggcctcttgtgagaaaatttcaaagataacaatcaagatcaataaagcgcccttgtttgaaaaccggaactgagttccggtttttgcacgcagagtgaaggagaccggcagattcgtctgtcggtctcctgtaatgcgggatgccggtcacaaccccggcgaggcgcagaatttacttggaaaggaattcacacaaatgagaacagaaaaaacacctgcatacagaatggccatgagaggaatctggcggctgcgttggaagagttttattattagactcatttacggtattttgagtattggcagtctctttgtaggagctactttgtacggagagagaattccggaagaaaccaatgacattcttctaattctcttgcattatgataatatgctctttatggggctgggcctattcttcttatataagatggtttttccacatggatttcacccctaataatactctctctcatcaaaaagtgcaagagacaataaattgtttcttgtatttccggtcacaatcccggctggacgcaaaagctattcggaaaggagtcttgaatggtatccaaagagttttttgagcttgtcgccgaaagtcgaggtgctacacttgcatggtgctgtgtcctgctgccgtttgttcatgcagcatggattgcaacggtgtacaaagggaacataataaaaaacttaataatggactgccaatcttacacaaagtaccgcccaaacgagactacgggcggtatttttgtatcatggcggagaaaggaggaacttcccacgggggcttgactgaaaagttgagccccttttttcatgccaaaaaacaggaggtaaatgcttatggcagatgataaaaccacaaaaacgccggaacagccggtaacggatagcgggccgggcaaggaaacgcctcccgctcccccaaaagagccggagaaggtttccgtttccccggagccggaaaaaaagacggaaccggaggtaaagaacccacaggtttccgtctataacttcgctgaaattatgaaggaaaagaaggtcgaggaacgggcggcagctcccagcgaggaaaagcctgtcccggcaaaaacggaaaaaccggaaaagcagccggaggctccgaagaaagcggaggaaaaaaccaaagagccggaacagccgaagcgccggggtcgtcccccgaaagcagataaggacaaggacgcagcctcgaagtccaaagctcccgcacagaaaccggaaaaggcggtcaaaaaggaaccggagaaaaaaacggctccaacggtgcagaccgctcccactccgaaggaacccgaaaagccgaaggatgcaccacgccggggcaaggagcagattgtctatatcaagctgaacgagctccacgccttcaagaaccatccctttgaggtccgggacgatgaagaaatgcgggctatggtgtccagcgtcaaggacaagggcgttacccagcccgctatcgtccgtccccgtgaggatggcggctatgagatcgtgtccggccaccgccgccagaaagccagtgagcttgccggatatgcggatatgccctgtatcgtccgaaacctgacagacgatgaagccatcacccagatggttgaggacaatctcaaccagcgtgaagaaatcctacccagtgagcgggccaaagccttgaaaatgcagcttgaggctatcaagcaccagggctcccgcacttcgggccaaattgacccgaaggacgctggcaaacgctccaacgagatcgtggccgagcgcaataagatggccgtcaaacaggtgcagcggtatatccggctgaatgagctggttcctgacctgatgaagctgatggatgaaaaaaagctgggttttactacggcggtggagctttcctatatcggcaagaagaaccagaactatatcgccgtcgccattgacagccagcagtcctcgccttcacaggcgcaggcaaagcgtatgcgtgagttggacgaaaagaagctactcaacggggatgtgatcgacggcattatgatggaggacaaaaaggaggtagacaaagtgattttgacaggtgcggaactgagcaagtatttcggcaaggaaactacgccgagggaaatgaaggaccagattatcaagctgctggacgactggaagggccagcagaaggaacacgaaaagccggagaagaaaaacgaacaggaaaagtaagccgaaacttcgggtcaacgtggcccgaggattgcggggctctgccccgcgccccgaagctctggagatataaattattccccgtcgccagttattccgtagcatagccgggaaaatcagtcaagggcagcgccgccgcaggcggtgccagaggcacccttgacggatttctcccggttatgctttttcccgatcaagcgacggggatataaattctccagagccgttccccttcccgggggaaggggcggaggggttgggcgaactcttgcttttccctaaaccaaaacagaaatggaggctcaaccaatgaaacgacctttagcatacctgaccgccgcatggagcggcgagccggatgttgatatggagctggcggcccactactgccgtcttgcttatgaggcgggcttttccccgatctgcccgctcttgtatctgccgctgtttttgaatgacagcgttcccgaggaacacaaggccgggattgatatgcgccgggatatgctgcggcgctcccacaccctgattgtctgcggcagcgctgtggacgaggatgtaaaaaatgatattgcggttgccgggcggctgggcattgcggcgaccacactggaaggggtgcttgccgtgaagggacacggcaccccgggccatgccggacattaagctgggaagccttttcgacgggattggcgtgttccctctggctgcttcccggtgcggtatccgtccggtatgggccagtgagattgaaaaagcgcccatctccataaccaaaaggcactttcccgacatggtgcatttgggggatattacgaaggtggacggcgggaaaatcccgccggttcatgtaattaccttcggttccccctgtcagaacctttctctgatcggcaaccgctccggccttgccggggcaaaatcaagcctgttctatcaggcgtttcgtatcatacaggaaatgagggatgctactgataacctatatccagctatcgctgtttgggaaaacgtcatgggagcgttttctacaaatgaccggatggactttagagccgtcttatccgccttctcggacaccgaagttccaatgcctccttcgggaagatggggaaacgccggaatggtgcgagggggaacgcctgatgtgtgctggcggctcatggacgcccagtattgggcaggctcccgaaggctggcacgaaggcagcggattttcgtcgtggcggattttggaggcagacgtgccgcagacatactatttaagccccgtccaatgctcccacttcctccgccttgcggagagggcgggcgggccgccgccgaaggagatcgaacagcttcttttgaaacagggcggcagataccagtcatccacccctttcagtgcttccgtatgcggggagcggcaaaaaggcaggaagaaacggccttccgaaacagcttcggattaccaactgacccttttcccactcttttagccagtgatgtaacgccctttgccttctggtatgagggcgacccggagggcggctgtatccgttttctgacggaaacagaaagtgaacggctgatggggctgccggagggctggacaaagtacggggcggacggcgtggagatccggcctctgcaacgctacaaggcgctgggaaatgcgattgccctcccttgcgccgattacattatggccgggatttatgaggtgctggctgaccgggccggaaaggaggaatgagcccatgtttgaagcctatataaccaatacagccctataccccttaatggggatcgaggtagggacaacggtacatttccccatgacgacacaggagttgcaggccgcccttgccaaaatcgggatagacgggaaacggtacagcgaagtgttctttaccagctttgacagtgatgtgctggggctctacgatcatctctacgaatgtgagaacatcgacgagctgaacgagctgggccacgccctgctggaagtacgggataagggcggactggaaacctttgaagccgctcttgtcttgggaaaccacacaaggagcgtgaaggatttgataaacctgacgcagaaccttgacctttaccgcttttacccggatatttccgatgatgaagggctgggccgtctttacgccgacgagcttgggactatcgacataccggagcacattcagaactacttcgattatgaggcatacgggcgggatgtgcgtatcaacgagggcggcgtattcgctcccggtgggtatgtgtcggcagtcccggagggcttcaaggagtattaccacgggccgcaggacattccgccggaacaccggatatttgcctatcctgaaaaggccgagcctgtccactccattctcgctacactcaaacggtttcaagaagccccacccgctccgaaaaaggacaaggcggggccttctcatgaagaacggtaagacttcgggccagcatggcccgaagcataaaggaggtgcataccatcaactattaccctatcaatgtaggagccgcccgccgggcaaaagaaatgaacagcttttccgcctacaaggaagggagcgcaacggcggaataccgggcaatggtggacaaggccgccgccatagcggaaaagcagaaatcccgggtggaccccatgtaccatgagaagatcgaccatctgttagacacctacgcccgcaagctggccgaaaacatgaaccaaggctttgccattgacgcgagggttccctctgtgctgatcgccgggccttccaatttcccggtgggaaagaaggaaaaacagaaccgagcgcgggacagcaacatggaggaatggcggcatattcaagggctgctggataagatacgcagcaccggcatgggcgggatcagcgccgatgacccggcagcgattgaaaagctccagaagaagctggacgggctggaacgctcccagctcattatgaaggaggtcaacgcctattaccgcaagcatggcaagctggacggctgtgcgctgctgtcgccggaccagattgaaaagctgaaagcaagcatggcgtcaagttggcgaagcgacccgaggccctttgaaagttaccagctaaccaacaacaacgcggagattcgccgggtaaaggcccgtatcgaacagctttccaaacaggcacagcaggaattttccggctgggagttcgatgggggtcgtgtggaaatgaaccgggaggacaaccgcttgcaggtgttctttgacggaaagcctgacgcggacacccgggccgagctgaaaagcagcggctttcgttgggctcccagcgtgggcgcatggcagaggcagctcacggacaacgccatccgggcggctgaccgtctggaatgtattaagccgctgtccggcgaaaagccctcccaacttcaaaagaagccctctatcttgcagaccatgcgggaacaggacgaaaaagtccagacggagccggaaaagaaagctccgtccggcagagatgccgagcggtaagcctcgggccacattggcccgaggttttctgttccccgagattgtacgggggcctcccggatagcgggaaccccgacggaaaggaggttttatgcaggaagaagtaaaccaaaaaacggttgccctttcaatcaggacaacgaagctcacgggaaaagtgctggctgccgctcttgggaaggtagcgcgggcgctgcaaaagcaccaccggaaggcgctgaccccgcagggacgccagagtgtaaaaaagctgatgaaccactatggcggcaaaagcgccatgccctatgtgggagccccaaaggattttgaccggatcgcaaaggagttccatgtggactacgctttccataaagtgagccccggtcattacctgctgttcttcaaagccaatcaggcggacgctatcacggcggccttccagaagtacagcgcaaaggtgctgaacaaagagcaggacaaggcttccatcctcggccagcttcggaaattcacggagcagatcaggacgcaggcaaaggaaaagcagcgaaccagagaggcggtgaaggacggacgttgagtgacaagattagaaaatatgtgctcccaaacctgccgtacctctttgtgttctggttcttctccaaaatcgggacggcataccggatcgcccccggcacagacttcgggacaaagctcatggggatgctcgataccttccccaaagcctttgaaacctactggccggggctgggaggtattgacctgctggtgggccttgccggtgcggctggggtgtatctgctgatacagtcaaagatcaggcaggcgaaaaaattccggcgggatgcagagtacggcactgcccgctttggaacaaaggaggatataaagccgtttgtagaccctaaatttcagaacaatgtcattctgaccgggacggagttccttaccatgaacacccgtccgaagatacccgccaatgcccggaacctaaacgcctgtgtcatcggatcgtccggctcgggaaagacaaggttctggttgaccccgcagctccttcaagcccattcctcgtatgtggtggtagacccgaagggcggcactctcgaccagtgcgggcggtttctgcaacgggagaaatacagggtgcgggtgttcaacagtatcgacttttcaaaatccatgcactacaatccgctggcctatatcaagacggaaagcgatgttttgaaatttgttaccgccctgattgccaacaccaaaggcgacggcaaggagggcgacgagttctggacaaaagcagaaaccctcttgtactgtgcccttgtggcctacatcgtctttgaggggccggaggaagaacgcaacatgaatacgctggtggaaatgataaacagcatggaagtccgggaggatgacgaaaccttcaaaaacgcggtggactatatgtttgacgggctggaacgccgcagcccccagcacttcgccgtgaggcagtataagaaatacaagctcgccagcggcaagacagccaaaagcatcttgatttcctgcggtgcaagactggctccctttgatattccccagcttcgggagatcatgtcttatgacgagctggagcttgataagctgggggacgaaaaatcggcgctgttcttccttatcagcgacacggacaccacctacaactttttggttgcccttgctttctcgcagatgttcaaccttctgtgtgaacgtgctgacaacacctatggcgggcgtctgccctaccatgtgcgggtgctgtgggacgaggctgccaacaccgggcaggtgccggggctggaaaaaattgtggccgtcatccgctcccgggagattagcctgacgctcttttatcaggctatgagccagtgcaaggcattgtacaaagaccattccgaaaccatcatgggcaacatggacagtatcgtattcctcggaggccgggaggcttccaccctaaaggatatttcggaaaactggctgggcaaggccaccatctctatgcagaccgagggccgaagccgtggacagtctgaaagttacagccagaatatgcagcggcttggccgggagctgatgaccaccagcgagatcaccaccatgcccggggataaatgtatcttgcagcttcgggggctcccgcccttcctgtccccgaagtatgacttgaaaaagcacccgaattacaagtacacagccgaatttgataaaaagaaaaacgccttccgcttggaaagcctgttccgccaccggccattgagactaaagccggaggacgaatacacggtgtacgaagtggatggctccgacacagacgaagaagctgacctattgaacttcgatgatctggacagcgacgagttcgtgtaacttcgggccatgatgacccgaagcgccgccgatgtgggcggctttttttgtacccaaaaccatcaaacaaacaaaatggaggaacgtatatggaatttttcaatcaggcaatcgacattctcaaaattctggttatggctcttggtgccggtctggcggtatggggcgtcatcaaccttctggaaggttacgggtcggataaccctgcggcaaaatcacagggcattaagcagctcatggcgggcggcggtgtcgttctgatcggccttcagcttatccctctgctgtccggcctgttcagctaagtgtcacccgttgtcccttttccagaaaaggagctgatgtatggactttatcatcgacgcaatcgttgaatggctgaaaggtctgctcgtcgatggtatcatgggaaatctggatggccttttcgataacgtcaatcagagcgttggcgagatcgccacacaggtaggcacgaccccggcggactggaacgccggggtcttttccatgatacgacagatctccgaaactgccattctgccaatcgccggggtcatcctcacttttgttatgacctatgaactgatacagatgctcatagaacgcaacaacctccatgaagttgacacatggatgttttttaagtgggtgttcaaaacctttgtagctgtgatgatcctgacgaataccttcaatatcgtgctggcggtctttgatgtgagccagcatgtgatacagcagtcagcgggcattatccagaacgggacagagatcacgccggatgtgctggacagtctgcggacagagcttgaggcgatggagttaggccctctgttcggactctggctccagtccttcctgatccagcttaccatgattgccttaaacatcgtgattttcgtcatcgtatatggccgtatgattgaaatttatttactcacaagtttagcgcctatcccgtttgccacagtccccaacagggaaaccggacacatggggcagaactatttccgctccctctttgcggtgggctttcaaggtctattgatcttagtctgtgtcgccatctatgcggtgctgatccagagtatcgccaccgacggcgaccccatcggggcgatctggggctgcgtgggatatacggtgctgctgtgttttaccttattcaaaacaggcagtcttgcaaaatccatcttcggctgccattaagagacttcgggccatgctgacccgaagcggaaaggaggcggtatgcctcggcgttacaaacagggtgcggacggacagccgcacccggctttctatggaaagctccccgaagaattttctaaagcagacaccatgcgctttatggtggaaaccgatctgaaactgtccgggtgcgtatcggcggacacgctggcggcactccgggcggaaggctatgactacaaggacgggaaccttgttcccgccggaaaggaggaaaccatgcaggaaaaggttgcaaacaccaccccggccgcaccgttgaagctggatgtaagcgtgcgggtcatcgaacctgtgaaaaatctgatgggctttgccagcgtgaaattcaatgactgctttgtggtggaaaatctgaaaatcgtacagggcagcaagggcctctttcttgggatgcccagccagccggacggcaaaggcggctaccgggatatggcctaccctgtcacaaaggagttccgagaacagctcaacaccgctgttctacaagcctatgaggcaaagctggaacagatggcggagcgcggctctgtggggcgtgcgtccatcagcgaccagctcaaagccgggaaagcggctgccgaacaggcaaaggcggaacggcctccgaaggaaaagcccaaccgcagcgcagagcgttgacctcgggtcatgctggcccgaagcagaaaggaggtgggaaccatgccacgcaaacggatgggctatgacgcggcctgctattacgacggaaaactgctgggccgctgtaccaaagcggacagcgacgcctataccctgttgatgaacgcctgtggtggggacgccgcccgggtcctgcgggaatatgcctatttttccccggaacttcgcgccatattggaaaaggcggcgctcatgcaggcggaccggagccggacgggcggaatgttccatgcgccgaaaagctccccgtggggcgaggtgcagagctgtgaaaccctctgtccgggggtgtttctggtatctaccgccagccacggcggaacgatggtggcaaatgaggtagccgctgtcctctccccagcggccaaaaagtgcggcttcaaggataagggctatatctgctatgaggaggacgcacaggaaagtgtggtgctccgggagctgctggacaaaaaactgtggaacatccctgaccgcattaaggacaaaggacagtttgaagaaaaactcaatcagtccatccggcagtataaccccgaatactggcgggcaaggcagagcggacgagaggccgccgaagctgcccgcagcacagccccggccaaagaggccgcaagataacctcgggccatgctggcccgaagcaataaaggaggtgtaccaaaatggcctatgtgccagtaccaaaagacctttccaaaatcaagacaaagctggccttcaacctaacgaagcgccagcttgtttgtttttccagcgcggcggtggtgggcctcccggcttacctgttttcccgtggcagtatcgggaacagtgccgccatgttcctgatgatcggcctcatgctcccgttcttctttctggctatgtatgaacgagacggtctgccgctggaaaaagtgctgaaaaacatcatccgcacccggttcctctatccccgtgtgcggccttacaaaaccgaaaacttctatgcgctgcttagcgccagaaaggaggcgcagccgattgcgaaacagcagaagggccggaaagcccgcaggcagaaagcctgaaaagcagggccttaccggcctgttcacgaaaggaaagaacattcccaccaccgcccagcagaccctcccttaccgggaaatgtaccgggacggggtgtgccgggtagcggaccgctattacaccaaaaccattgaatacgaggacatcaactaccagctcgcacagtccgaagatcaggcagccatctttgacgggtggagcgcctgcctcaactactttgacagcagccttccgttccagctttccttcctcaaccaccgaagccgcccgggcagccggtacagcgtgaacatccccatgcaggacgatgattacaacagcgtccggtgtgagtatgtggaaatgctggaaaaccagatcgccaaaagcaacaacggcattgttcgcacaaagctcctgaccttcggcgtgaacgtggacgacctttccaccgccagggcaaggctggaacgtgtagaggcggacatttgcgggaacttcaaaaagctgggcgtcaagtgccgctccctttcggggctggaacgactggagcttcttcacgggcagcttcaccccggcagcggctcccccttccggttttcatgggatatgatccccaaaaccgggctttccaccaaagactttattgccccggacagtttcgattttcgtttcagccttctgttccgggtggggacgacttggggcgctgcctcctacttgcagattttggcctcagagctctcggacaagctgctggcggagcttttggaaatggatgcggaaatgaccatcactctccatatccaaaccgtcgatcaggccgccgccgtaaaatccatcaaggccaaagtctccgacattgacaagatgaaggtggaggaacaaaagaaggcagctcggtcagggtacgacatggacatacttccgcccgaccttgtaacgtacagcaacgacgcaaagacccttctggaagatttacagagccggaatgaaagaatgttcctgctgaccttccttgtggtaaacatggccccgacccgccgggagctggacaatgacctgttcacggtgtcgggtatcgtccagaaatacaactgcaccttgaagcggctggacttccagcaggaggaaggttttctttccagccttccgctgggccataacggcattgagatcaagcgcggcatgacgaccagctccacggccattttcgttccctttatgacgcaggagctccgcatggatggcgaagccgtctattacgggctcaacgcactttcccataacgtcatcatggcaaaccggaaaaagctcaaaaaccccaacggcctgttcctcggcgtgccgggctccggcaaatcctttgccgcaaagcgggagcttgtgaacgtgttccttgccacccgtgaccggatcattgtggttgacccgatgggcgaatattcgccccttatcaagcggctgggcggtcaggtcatcgagatcgccccggacagcccccaccacatcaatccgatggacattgatttgagcttcgacgaggaaaacccgatggcgctgaaagccgactttatcctgtcgctgatggagctgatcgtcggcggcaaggacggcttgcagccggtggagcgtaccgtcattgaccgctgtgtgcgccagatgtaccgggaacacttgcaggacccggaaacaagcaaaatgccgaccctccaaaccctgtatgacctgctctgttcccagccggagggcgaggcggtacgactggcaactgcccttgaaatctatgtgtcgggttcccttaacgtgttcaaccatgaaaccaatgtggacctgaaccgccgtctggtatgccttgacttaaaaaagctgggtgccgggcttcggacgattgccatgctcattatgcaggacttggtaaactcgcaggtgtccatgaatttcctgcgcggtatcgctacatggtgctacttcgacgaatttcatgtgctgctccgtgaccgtctgacggcaagctattgtgtggcgatctggaaaatgctgcgaaaaaaagggtgcgttcccagtgctttaacgcagaacgtgaaggattttctggcaagcccggagatcgagaatatctttgaaaactcggacttccttgtgctgctctcgcaggcacagggcgaccggcagattttagccaaacagcttgggatcagcccccaccagctttcctatgtgacccataccaattccggcgaagggctgctgttcttcgggaataccaccatcccgtttgttgaccgcttcccgcagaataccgagctgtacgccattatgaccacccgcccggaggacaaaaaacaggaaatgaaccgggcataacgcacttcgggccatgctggcccgaggtttggaaaggagggatacatcatcggaaagaaaccggataaatggaattttcaaaggccggggccgacggaggataccgagagcaatcgccccggaccggctgaacgggaagggccttcccccgcaccatcccgacgcctgcggtttaaggacgaggataccgggcaggacagtccttcgggccatgatggcccgaagtccaaaagcggcaagtttcaagaggacagacggaaaagccatccctctgaccgcatgaggcaggaagatgaagcggacgggccgcaggataccggcaaggcacaggagccggagggctccgccgagaaggccgggagcaaaaaggacaagtaccagaaagcacaggcaaaagcggaacacgccggggaaaagctgggaaaggcccgggagaaactggacaagaccgaggcaaaacgggcagcgaagaagccgccggggcttgcgaagaaagctgtccggggagcccgcaccgaagcatggttttatctccacaacaaaatccacgaagttgagcatgaaaatgtgggtgtggaaggagcccataagtcggaacttgtggccgaggccggagcccggaaactgacccggtatgccaaacggagataccgggaacacccggcccggaaggtggcaaagtgggaacggaaggacataaaagcccgggccaatgtggattttcaaaagatggcctccgatcacccggagcttgccagcaatccgctttcccgtgtgcagcagaaatggaaactgaaacgccggtattccaaagaagcaaaggcggctgcaaaacagggcgcaaaggccgcaaagaaaaccgctgccgcttcgggaactgcgacccgtcgggcggcgcagtttgtgacccgtcatcccgtggcggtgctggtcctgctcctgctgttgctgctctgttttcttgtgtcggcggtaagttccatcttccccacgcttggcagcggcctcgccaatgcgttatccggcacctcctacgcctcggaggatacggacctgctgggggtggacgaggactacacagcgctggaaaacgagctggcgcagacggtggcaaacatcgaaagcacccatcccggctatgacgagtaccgctattccgtggacgagatcggccataacccctatgagctggcgtcctatctctcggcaaagtaccatgtgtatttccgtgaacaggtgcaggacgagctgcgggagattttcgaggcacagtatgaactgaccttgacggagaaagtcgagatacgctaccgcaccgaaaccagcaccgacccggagaccggggaaaccaccaccgaggaagtcccctatgagtattacatcttaaatgtgaccctcacaaacaagacgctgcctgccgtgatcctgccgaggcttaacgaacagcagcgggaaatctacaccgttatgcagcagctcaaaggcaacaagccctatctgtgggaggggatttacaacggcggcgaagataccggccccagctatgagatacccggcgaggcactggatgacccggcttttgcggcgctcatggaagaagccacaaagtacatcggctggccctatgtgtggggcggctccagcccgtccacctcctttgactgttcgggctttgtctgctgggtgtacacggccagcggcgtccacaacctgccccgtaccacggcgcagggcatttacaaccagtgtgctatcatttccccctccgaggcaaagcccggcgatattatctttttcacgggaacctatgacagccccggccctgtgtcccatgtggggatttatgtgggcgacgggatgatgcttcattgtggttcgcccatccaatacgcaaacatcaattcaagctactggcagacacatttctatgccttcgggcgtttgtgagccagaggaaaggagtccttgcatgaacaagatcgacaagctcgataaggaactggaaaaagcccgggagaaggctgccgagtggcaggccaaaatccgggagctggaaaagcagaaacaggaggaagaaaacagccagatcgtgcaggcggtgcgctccctcaaattgacgcccgcccagcttatggcttttctgaatgaccccaaaaacagccttaccgcttcgggccatactgacccgaagccggaggcacccgaaaaggaggacacagcccatgaagaaaattaaataccgcaggctggcggcgatggctgccagccttttgtgttgcctgatctttacagtcccggcttatgcacagagcagcgagccgcagccggagacagctccctccccggcagaaaccgaagcagagccggaaacccagaacccctttaccccggacgggacgggaaccgtggtggacaacgccaccgacgaggatggaaaggagttctacaccatcaccaccgcagacgagagcgtgttttatctggtgatcgacaaacagaaaaccagcgagaacgtctatttcctcaataccgttaccacagacgaccttctgcctcttgccgaacagggtaaggaaccgcccaaagaagtgaccccggagccagagccaaagcccactgaaccggtggaggaagtaccggaacccgagccggagaaaaaggacagcccccttctctctctgctcctgattggtgcggtggtgctggccggcggtggaattggttactatttcaagatttacaagccgaagcatgaggccccggatttggaagatgattactgcgaatatgaggacggggagctggaggagatcgcagaggaacccgaggacgaagataccccgccgtgggaggaagatacggaggaatgagaatgaattttacaagcagcccttttgaacgaatgatgaaggaagtaccgcaccccggctgggacaatgacaacccttgtaagggatgccgttactacaaggagtgcaaaggaaagaaaaaacagtgccggaagaagttccgggcgctgatcgtggagccccgcccttcgggccatcgtggcccgaagtcataaatggacgcccgggagctgacccgtgacgagaagaagaaaatccgttctctggtcacggggatgtgtgccaactatgacagggaaagcggcctgtgccttcctctggactgtgcctgttatatgctgcacaagtgctggacaggggcgtactgccgttacttccgtgaggctgtcctgccccttgacccggagcttcaagcgtcgttgacaacggaaggcatctccccggagctgcgggcctgtgcggtctgcggaaaggcattttggcccgatgggcgtcaagcctactgctccgacgtctgcaaggccgaaggaaaccgtcggaaaagccgggaacgcatgaggaaaatgcgggagaaaaggccgggcggctgttacgatttgccgcctccaaaggcttgacattccgggcttttttgagggtgtttctggggtgggaatatcttattacatttctccccggtctgccctcttatttcgtaacatccagcacttcgggtcatgttgacccgaggcacagaaaggagggatctcttggagacagtacaaggatatgtgattttgaaagctgccacctttgaaaccggacacggctttgcgttggggcataatccgggagcgccgagcccctttgtgacctggcagtttaccgagggggaaaacggccatcgggattactactggggccgctatggaaccagtcaggcgtgggcgcagcgggactttgaccgccgggtggacgactatcagcagttttaccatgcggcggtcaagcataccgagctgggactggagggcgtttaccgctattattccacccagcggcccgtggacataggaacttacccgaagccgccggataaccagcctctttccatcgtcaactacgatgacgacaggcggcgtcctgtggcagacggcaggctgatggcatggggcgaactgacctacgcaaagccgctgaccgaaaagcagatggaggattatgaactgaaaccagcaccgggcaatcctgaccgggtgcgcccatccattaccgcccggctcaaagaaggaaccagagggcaggaacccccgaaggagcccggccagaagcggagccataaaaaccatgaggaacgataaaggaggatcgccatgcacgaaaaagacaactatctgaaaaccgccgagctctccacggagcagaactgcaacatgatcgacggcgtacccaacaacacgcctatcccacccacgcccccggagttggacgcaaaaccgcttgataaggtaaaggagcccaaagagcgccggaaaggccgggagttggaacgctgatggagaaccgcaagcggaatgtccatctgcacgttatggtaacgccggacgagctggcagccatccatgaacggatggctgaggcgggcatttccaacgccggggcttatgtgcggaaaatggctctgaatggatacatcctgcacatcgaccttgcacctgtaaaagagttgatctctctgcaacggcgctgttctaacaatctcaatcaggttgccatacacgcacacacctatggcgtgtacccggaggaaatcgacggattgaagcgggactatgaaaagctgtggggcgaggtgtcaaaggtactgcgggagctttccgagctggtggaaaagtaagacgagggcggcaggcttccgttgcggggcttgccgccctgctctttttttaccacttcgggccagtatgacccaaaagtttgggacaggatttactaatctttcgcaacatttatgtccccgggcaagcatgataaaatagaggtaggaaggatagataaaggaggttttgaagatgaagatactgctgaaaatattggttgctccctttgctttagcgttgtcccttctggcggctctgctggtgttcctatttgatatttgtgccgtcctgctgacgattgcctctgtgatcctgacggtgctgggtgtcgctctctttttcacgccgacgcccataggcgggattgtatttctgtttcttgccttccttctttcgccgtatggactgcaagcggcggcgggctcccttctttgggcgctggacggaggcaaatccgctctgtaccggtttctggcaagttaagcagcctcgggccatactggcccgaagtcggggcggtctgaatgggccgcccctttctcatggaaaggaggaatgatttttggctaccacaactttgttacagcgccatgcgggcgaaggcgaaacgattgctgaggctatccgggattgtctggactatggcaaggacccggagaaaacagaaagcggaaagtatatctccgcttatgaatgtgatccggccaccgtggcggacgagttccttttggcaaaggccagctatgccgctatgacgggccgggaacagaagaaagaaaataatgtgctgtgctatcagatacgacaatccttctatccgggcgagatcaccccgaaggaggcgaaccgtatcggctatgagctggctatgcgctggacaaaggggcggcacgcttttatcgttaccacgcacaccgataagcagcacatccattgtcacatttattacaactccaccacccttgactgcacccggaaattccgaaatttttggggctccagcttcgcccttcggcggctctctgacaggctgtgccttgaaaacgggctatccatcgtggagaacccgaagccccggagcaagggcaagtatcggaactatggagagtggcagaaagaccggaaagggccgctttcctatcaggacaggctgcgccttgccattgatactgcgttggcggaacgccccgctgatttggacgaatttctcaatttgatgaagcgggccgggtatgaggtcaagacggttcggggcggcggtatcagcttccggctgaccgggcagggacaggaacgcttcacccgtctgcgtgcctccacgctgggggacggctacgacttgcaagatgttctgtccgccattgagggcaaagaaaaacgccccgggcgctcggagcggaaaatcagtctggcggtggatattcaagcaaagctggctgccggtaaggggccgggatatgaacgctgggcgaaggtatttaacattaagcagatggccgccgctcttgcttatatacaggacaatggcctgaccgattatgagcagttggcacagaaagccaccgaggcagcagaccgttttcataccatttccgagcagatcaagcagacggaacaggccatgaaaaccaatgccgggctaaaggccgcaacggttcagtatgccaaaacccgtccagtctttgagcagtataaggcgacgaagtacagccggaaattccttgcggagcatgaggccgaccttgaactgtaccgggctgcacaagcggaaatgcgctctctgctgggcggggcgaagctccctaaaatggatgtgctgaaggaggaaggccgcaagctcacagcaaagaaaaaacagctctatggagaataccagaaggcacgacgggatatgcaggagatcgtcacgatcaaggcgaacattgacactctgatgggctacaccgagccgggaagaaagcaggaaaaggagcgttaaggttatgaaaataaggagcaaagcgacgctgacacttcgggccatgttggcccgaagatacgggtttggggcgagccccaacaagccgcctttgtgccacttgtggccacagaggcattgcttgccatttagcggaacccccgaaaagtactccaaaaacaagaaaaacgaaggcccttttacatgacctccgtttctctggctttttgtagtccctctgctgtggcctccatgaccgtcaattccttttcgtccattgagttgagcagtctatcaatgtgctggcggcagtcgctttcgctattttgcctgtcaggataaaagaattggtctacggaaatatccagcaaggtgacgatttggtaaaaggtattcaggcttggatgctgaccccggttttcaaaatacatgatagagcgtggggtacggtctacaagctgtgcaagatattcctgcgtccaaccttttgcctctctcttgcgcttgatctcccggcctaatgcgtggaagtcaagccgtctggtgtcttggtacattctcatatcacccctatattattttacatttcgggtttgactatgagaacgaaacacgattttatgttttagtagtattttattgcccgtcggcaaggttgccgatgttacacggacaaggtataataacagaaagaaaatttgaaaactacactttaatcacaaaaatctatgatacgctatctttggaggtgttattatgcaaaggattttagtcgttgaggacgattttgatattcaagaacttttacagaattttttacaagaagcaggatatgaagtagctgttgcaaatgatggtgtcgaggcactatctttatttgcgggagaacgatatgacttgattgtgttggacattatgctccccaaaattgacggttacggtgtctgtgaattgatacgcaagcaatctgatgttcctatcattatgctaaccgcattaagcggagaagaagatcagattaaaggattggatttgcaggtggatgactacatcacaaaaccgttttctatgcctgtcctgctccgcaaaattgcggctgtacttcggcgcagtaaccgggaaacagatgaaaagtatcaaatcattacttatggcaatttgcttttgaactgtgacagctacaccgccaccgtggacggagctaattttgaactgacacaaaaggaatttgaaatactgcgggaactgctgacccatcagggccggatattgacccggcagaacttgttggataagctgtggcgatatgatttttatggggacgagcgtgttgttgatacccatatcaaaaatctacgaaaaaaattgggaatagatttcattcaaacaatcagaggggtgggatataaagttgataaagagaattaaaggcagtctgtttgctaaagtctttattctgactgtggcagttttgctctgcgtgagctttcttgtctatggcgttttggcttggtatatgcctcaaacctattctaacaatctcaatgcggcattagatgaacagacaagcgactttatttatgaattagaacatatccgtatgcaggatagcggcggactttttgatcagtttcttcaaaacacgacaattagcatggtggagctttatactgctgatggtgttctggtggaaacaccgtctaaccaaaatagctttaacgatgggatcaccggggaggctcttggcggagcatcttatgaaagtgcgccgattatatccaacagctattacttctcatttgcagatgataataaccaatatattttaacagtttatggagaagcctctcaaatcgcagaactgcggcaatcatttgtaagcgtattaccgattttgttttgcgttattctccttgtatcgttggcaactgcttgggtgtattctcgtatcattacaaacccggtattaaaaatcagtcggatttctaaagagatgtctgatatgcggctggaatggcaacttgaggaacgccgttctgacgagctgggtgtactggagaatagcttgaatacgctgtcccggaaactatctgttaccttggaggagttgcaaagtgcaaatctccagctccaaaaggatattgaacatcaaaaggcgctggaacgggcacaacaggatttcttttcttccgcttcccatgaactgaaaacccctatcaccattatcaagggtcaattagaggggatgctattgggtataggggcatataaagaccacgaaaagtatcttgcccgatccttggaagttgcagctacgcttgaaacgatggtgcaggaaatattaacgatttcaaggctggaaaccaatgtcgatttcaaaatggagcattttgattgcgctcccatgatacatggctatttgagggagattgatgatttagtggcaacaaaagagctacaaatacatcttgctatacagtctcccgcttttatcaatgggaacaaattactgattgaaaaggtgttctccaatttgatttcaaatgctgtaaagtattcgccgcatggagcaagcgttaatattattttacaaaataccaacggacgctttttgttctccgtagagaacacaggtacacatataccagaagatgatattcccaaattgtttgacgctttttatcgtatggagcaatcccgcagtagaagaacaggcggcagcggcttagggctttatatggttcaaagaattttacaacaacataacagctattgtgaggcttgcaacacagaaaacggtgttaaattcttcttcacgatttagcggacaatcagcggcaggtgaacaacctgccgctttttttaactacacataaatcacaaactaatcccaaaggtatcccaaaatgctttgctatacttggggtacattcaaagaaaggattggtaaacactatgagaagaatggcattatgcgctgcgtccatgctcttgttaggctgtttggctggatgcagtacgacaccacagaacagccaggaacaaggtaatcccgttatcaaggaagaaatcagtcaacctcttggcggttctgaggcgctgggaaacagcgaggacagctcggcactctccgccgcagacaaagaaaaaatgtttgcaccttatgaacaatacgggatgacctatgacgcggtcaaagatgaacttacctataacgggaatttggttcgctggtttgaggactattatcccatcagtaacaacgaaaccgccggtattgattttctaaatgagaacggcacagtagatgtgtatgctgtacgggatttagagagcttttcaaaagcggctgacggctccgttgatccggcgggtaaactgattggcttaaaagagtttacccagcaggaatttgacgcacgggatattgaggcgttgaaaaacagcacatccgttgctatggcaggaacgccgcttgaagatagcgaaactgcaaagctcgttgcagagtatgaggcatttggagtaacctatgatgccgaaaaagatcagtggtatttcaatggtgaggaagtccgctatttccgggacgttctcacttctaatggtgaaagcctcaccagcggaaaattccaaggcgaaatgagaacgcttggaagtggtgttggcacaatagacatttataccgttcgtgattacggccacttgaacagcgaacatcacggaacattaactggcatcgagaaatacagtcaagaggaatttgacgagcatacacaggccggaatgtctggaaatcagcccataggtaatgcaagccataactaaataaaccatctatctgccgcacgacggcaaaagaaaaaaagccgtcgtacagcagcctatcaatacgtctatttgaaacggcggctcaattttcagagccgccgtttctctttggatattcagtaaccccacggcggcccataggagggtgtcgccgtgtccatcttactttctcacaattcccatgaccttcaccagctaaaaaaagcgtagctccccctccgggacagtctggctatgaaggtacaatatatcagtacaattatgataatgtaatttcatgcgtctgcatagtgtcttgctgtgcgggcgcatttcttttgctttgcctcgggccaacttggcccgaagtccaaccccggtgtcgctctccgccgccctccgcttcggtcgctcgtcaaccaacaaccgaaacggaggtcaatatggctattatcaatttgcgggactattacccattctatacatcagattgcttcatggaagtatcggaagaagttgcagaaatgttcaaagagtttgatcgtaaagaggctgcctaccggctgcgtacataccgccacaaagcctactattcccttgattgggatgacgggctggagcatgaagctgtctttgtcgccttatctccccatgaactgtatgagcggaaagtgaccatgcaggagcttcatgcggcgattgccagtctgccgaacaaacaggcaaaacggatttacgctcatttcattctcggcatgaccaaacaggatattgcccgggcagagggcgtccatgaaaaagtggttcgtgtcgcaatcgagcgaggtctgcggcacttagaaaaaattttgaaaaattctttgtaaggcgtaccgatttaggccggaaaatgaaatggcttatgagaggcaaaacacttcgggtcacaatggcccgaggttcagacaagcctcatgcagattgaaaattgaataaaaagacacccggatacgaagggaaacgcgctgtgtgacagacccgccatgacctcggatttcagagaatacagtctttgtaaaactgagcgagcgaacaggtccatgccataggtggggcaaggctggctccaccggaacaggcgcagaacccggatacttgcgtttagtcacagtccgagcgttgaagcggtcttgcaagccgtgagccgtcgcaggcaatgagaacgccttgccatcagaatggggagagttgaaatactatggggcatgaagcctatgtccgtccggtgtgtctgaaatgaaatgaaaacctatggggagcccccggcaatgctgtctgatgatagaccaaccgatccggcgtggctccccatcttttcaaaagaggagcactttatgggaaatgcgtttggaatgatccccggcttggaaccggacgaatggagcaatgacgcctgccgtggttatgtcattatggcaatggagaactgcggattttcaaagaaggatatacggcgagttgtggggcaactttataaaatatttgacctcaacagcgtggaggacgccaaagaaaagtacctttccagtccttgctgacctcgggccacattgacccgaagtggagaaagctcaaagggcggcacctgctgggtgccgtcttttgacatttccccacaggacaagcgggaaaggctggcatatacacgcactttcgcaaaggaggttttcaatgacgcaagctgtcacttatgaacgagaaacaaagtctgtcgcatttcaagggaagatcattgtgctggaaagcctcacgccggtgcttccaccgaaggagaaagaacagcgcaaaaaagaaattgagcgctgcctttttgaggtgttcagcaaatatggggacaggtttccctaatcattcgcaacattgttgtccggggctgctgatggtataatatagttgtaaggttggtagctccattccagcaaggaaaggagcccaatatggaatttatcagagaagattgtatttacgcaagacagtcagtagaccgcaaggacagtatcagcattgaaagtcagatcgacttttgcaagtatgaattgaaaggcgggagctgccgggtatttaaggacaaaggttattccggtaagaatacggacagaccggagtttcaaaagctgctgggcgagatccgcaaaggaaaggtccggcgggtcatcgtgtacaagctggaccgtataagccgctctattctggactttgcaacgatgatggagctgtttcaagagtatgatgtggagtttgtatcatccacagaaaagtttgatacttcgaccccgatgggccgggccatgctgaatatctgcattgtattcgcccagcttgaacgtgagacaattcagaagcgtgtcacagacgcctactattcacggtgcctgaaaggctttcacatgagcggacaggcaccatacggttatcagttagagcctactgtggtagagggtatccgcacaaagaaaatggttgccgaccccgtagccgccgaccatgttcggctgatgtttgaaatgtacgctgaaccggaaacctccttcggagatattacccgatacttcgaggaacatgacataaaaatttatggcaaatccatgttccgtacatttctttcccagcttttaagaaaccccgtttacgcacaggccgatttggagctgtacgaatttttcaagagtcagggtgcagcgattgtcaatgacgcttccgactttgccggaacaaacggctgctatctctatcaggggcgggatgtgaaggaggacaaggacaggtgcttaaaagaccagatacttgttatcgctccccacgaagcactcatttcctctgacacatggcttaaatgccggaaaaaacttatggcaaataccaccttccagcagggacggaaaccgaaaaatacttggctggccggaaaaatcaaatgcgggcattgtgggtatgctctgaaagccacccatgtaccaaacagcaccggatatttccgctgtaccaaacggacggaaaacaaaggctgtccgggctgcgggaaaatccgcaaagaagaatttgagcaattcattttctcggccatgcaggaaaagttcaaagactttcagatactccacggcagagaggaaaaagtcaatccgaaactgaccgcctatcaagtggagctggcacaggtggaggcagaaattgaaaagctgctggatacgctgaccggagccaatgcgaccttgcttgcctacgccaacaaaaaaattgaagaactggacacccgacgccagaccatttcaaaggcaatcgctgaattgagcgttgaaaccatatcgccccagcagataaagaagttatcctattatctcgacaactgggacagcatagattttgacgacaaaagaaaagccgccgatggtttgatctctacgatcaaggccaccagcgaccgtgttcagatagagtggaaaatctgacatttccgctctatcgcccctcatttctattttatctcgtttgtaccccttgtacaccgatgtttctcagcgcgtttatcacgcaaagtattctggctcacagacagggtttagtatggaaagacgcaataacgcaaacggcaacaaatgcgcaatggggaatcattctgttcaccgcactgtctattatctactttcgatctctaacgattgtgttcatctggttcatcacggattctgtgaggcatcttttcagaatccgaaaaagcatcaaggaaagcgactccgcagacttgttcgatattgtatacgtttgggtcgagttacttttcattctgattttgttttttcttgctttgctgggctgctttcctttccttaaatagctcatcactactaagattcagctcatctaacgtaatactctttttgagtccgcagtgtgggcaaaatatcacccacttccccaaatcatccttcttcacttctattttatacttccttcaaccgtttcatttcgttctccttaaagcataaaaaatcgtcatccttttcagatgacgattcgtcttcccgcaagcaatatttaattttcgctcggcgctccaaacaggatttgcataaaattcctgcgcccgtaaagcacacggataatatttaccgtctgattttcgattcggtaaaatgccgtataattgccgcaaaccaaaaagcggtaatccgtttcaaagtctacaatagaggacagcggtgcgccgctgtcgggaaagctggcaagcatacggattctttttgtaatctttgcgaccgtacctaccgccgcctgctcattgcaaagctcttccgtaatatatacctttgtctgatgtaagtctgcgactgcttccggtgaaaattttatctcaaccattggcaatacctaacattttctcaacatcggcaatgtccgtccagcctttttcctttgcggactgttcgcctttggaaagctcgcccatcagcttaatcacagcttttgttttttcatattcctccatgtcgacaatggcatatctgcccctgccgttttttgtcaggaacacaggttctccaaccgcaatatcccgcagtacctctgtatagtttctcaaatcagacacaggctttatatttggcataaaacattcgctccttgtattatagcgtagtagtaattagagtccctctccaaggacttgtgcttcactaaaagggatgctgtggtttggtgattcactcctgctacaggatggttcttgaaaggttccgaccattgccccttttaaatctgctgcatttattatagtttaattcaccgcaaaatacaacagcatatttgtaatttgcaaaaatgttacagttataaccccatcatctcccagataatctggccgctcatcttcacagttcccaccaaaacaagcatatgagaatagcagacatctctattgaaacgcaaatcaaaaggaggaattttcaacgaagcaaaaattgattataagtgtagtgttcggactgtttctgctcatcggcctagggctgatcgtttaccccatcttcagcaatcttttagtgagcagtgcacagtccgctgttcaggcgcagtataccgatgaagtcagttccatggaaaatacagagatcgaggaggagctggaggccgcgcaactctacaacgaggccctgttgagtgtacagggtacagatgaggtaaaactgcgcgcctatgatgagcttctcaactttgtcggaaacggcatcatggcaacgttagaaataccggcaatcgacgtagagctgccggtttaccacggtatcggcgaggatgtgctgcaaaagggtgctgggcatatgcccggcacctctttgccggttggcggagaaagcacgcacgcggtcatatcggcgcattccggcctgcctgccgcgcggctgttcacagacctcgataagctcgaggagggcgatcttttttacatccacgtgcttggcgaaacgctgtgctacgagatcgatcagatcgtggtgacgatcccatccgacacagaggccatacaaatcgagaaggggcaagattatgtgaccctgctgacctgcacgccgtatggcgtcaacacgcaccggctcttggtgcgcggacgccggacagagattcccgaaacgccgcaggctatatcggacgaacccgagcaaccggagagagcctctacatggacggaaaaatatctacagggcattgccttcggcatggctggcgcggcgctgctcatcggcgggctggtgctcgcttggaaaatcaagaaaaaacggaactgagttttgaaaggaacatgcactgtgaatttaaccaatgaacaaatttcatttgtaatccgtactccagcctatctccatgcaaaagaaattctcgagccttgtcgggatgaactcagcagaaactcattttctattgcgctcaagtctgtcaaagaaatagagatttattctttttttattgaggcttgtctcaagtattcatatcatcgtgatttttttctttttccacgttatgctgaaaaagaaattctttgtatctgcaaagagaagcctatacacgaaataatcattgatcttccctattctgcaagaagcaaatattttccatttgcagaacaggtcagccgcattctcggacaaaagggcaacatgtactttttcattaacaatattctttactcgccagagctaaagctgtacatcgtttgtcgggataccagccaaattgaaaaaattgaagccgtcacttccgggcagatgcttacggtaaataaattacaaagtctggaaaatctcaaagaagaagcacattaccgccgttggagcatgtacgaaatcccctgtaactgcacagcagagcagctatcagatttagaatcactctggtttctgttcccagaactaaaaatcctatgaacaggaatataatgtgcttccgcttttacaaggcaggttgccggtccatccatccggctgaaaggagctgtggttggaacctttccgaaaccatcttgtggtaggagaaatccaccaatccacagcatccctttcagtgtagcactcagcccttggagaggggctctaataactactactttattatacaaggagaaatctgtgttttattacatgtcacacacattctatcgctcaatattcgattactacatggaatcgacatacttcaactatgattgggagaacttattcatccatgacatcggcttatgcgagaaaaacgacaggcgcgggacaaagtttgacttcatatccgatgtctgtgccgcatttattgcgaaaggtataaacaagcagaatgcgcactatatcctttccctgaaaatgactgatgaacagatcgaaaaatacttcaactccaattacgatacaaggcacctgttccgaatcatgatcgcgcaccttatggacttggacagcggacagatcgcgcagattgaggataaaagccacgaaccctattcgcaagcgcttcttgtacagtttatctgtggtgtatcggcagacaaaactaccccgatcctcaaactgcctgtatcgcaggcagataagctcgcgcagatcagaaagctggcgggcgatgaaatctatacgcttgtctcatgcagttactttaatagcaggcgcaaagctatatctgtaaaagccagacataccccggaagacaatttcatcgatgacagtgggaatatctataagaatttattcgattcgcctctttatacgcagtttgaatattgagcactactcgtgcccggaaaggagagttttcatgttttcagagacacacaggctggtaaattaccggtcaatattaacaatatatctggaatccgcgtattttacgtgcgaattcgaaaaatttcgcagcaggcatctcggcttctgctcacgaaacggtagacaatacgagtttcggtctgacagctacgcggtttattcgcaaaaaattggagcacaggccattgacgcggctttatcacataaaatgacagatgagctgatcgggaagtatttcaattctgggtacagtacaaagcagctgttcgccgttctgatggggcagctcatggagatggacagtgcacagcttgggctgcttgagaatcagtgctgctctttttgctctgagacgttgctcacacagttcatgcgcggtgtacaagctgaagaaaccgcccaaattcttggtatgcaaatatcggatgcagaaaaggagaaccgtatccgggcgctgcatggaaaagaaacatacaagctggctgcatcttatttttataaaggaaaaatcaagaaagcctgtgtagatgccagacgcatgccagatggaagttttcttgacgatgaaggcgcaatctataaaagtctacacaacgattattttcggtagtatttttatatgctgtgcatatctgagatacgtgactttgtatttttttcctgaatttttaaacaccgaaaacagagttacataacactctttatttttcagtgatttataatcctcaggaatatgctgatacactttgggactaactaagattttgcatataagattcgagtctgtacgttttgcctctttgactctccataacaaaagataatactgcattgtgttttttctattatcatgacgctgctcccaagttactttaacagtaccgtaactgatcattggtacttcatattcatcttcagccattcgactataaagattcttttgcattaaacgcctcgaattaatgacagcttttgaggctgtcgcattacttttattacgcggactccgtaatgtcgttgatttcgtttcggcttgtttgatcatcaaagagtctctggatattcgcaacagaacgctctgaatctgtcgctgaacatattcttgatcttcagtatctgttgagttcatcagtttttttgctctctgaacggaatgcactgcctgccgcaaagagcaatccgaagtatgctcactatgaggaaaagaccggagatacggaatagctccatttacatatacaagttgagcttgcttacattcggggcaaaacagatggttttcgtactgcgcatgatatgtattgattgactcttcgcaaatatccgatatatcctcaaccgtcactatccgttgttctatctcccagtatgcatctgtaaacttcattttctcattcacatccttttcccaatttataaatccattatagcaataaagtcaccgccatgcaaagctcaatatctccttctttacgctgccatgcagagtgaaaaagagctgtccgaaatctcgggcagctcttttgtaatgcaggttgccggtcacaaccccggcaggcattccctgcaaatcatttagaaagaaaggatgaagccatgaacagaaacatgaaggttctgcttatcggcgcggctatcatgctgtttgtcgtgggcggtacggtttggcaggtcgtagaggtcaacaggagcgggcgttcacctctggccgttctattcgaggacgaagccacacccgccccctctccggagccaacccctgtcacgattgttctgcgcgaggaaacaccgacgccagaacctaccccaacaccaactccggaacctaccccagagccgacgccggaagtcacacccgaaccgacgcccgatccagcaggcgcaacgcccacgccacgcccggaggtcgtagaaacaccgccggagcccacgcctgttccggatgccgaagccattactttggatgccgccagtatcaacattcaagtcggcgacacttggcgaatcaacatttccgccgcaccggccgctctctacgaacaggaagtcacgtggacatccggtgacagcagtatcgtacagctcacagattcgaacatctccggcgtcaccattacgggacttgcggccggagccaccaccgtgacaatctcgacaccaagcggtttatctgcaagctgttccgtcacagtcagttgacacatccataacttttgaaaggaagaacacaaatgtacaagttcatcattttaacatcgatttcaagcgcacttgaaatcgtattcaagacgcaaatacagcctgaaatcaagggcgtggcagacatcgctatgtatgtcattgccgccgtgctgctcatagcacttattgcacgcggcgttgttgtcggtatcagttaccaccaaggcggggattttaagtgggtcgcccttcttgtcctgtttatcggtatcgttgtggccgcctctgctccctcttggatgtggacgctcatcggatggtaacgctccgcgcgacggcctcattcaacggaaggacggtgtttacccttgtttgcgagctcctcgctagaggaaatctatcattacgtctactatcaagtcgtctcgctggcgacaacgatgcttgatgaggtcaacggatataccgtcgatcttttcagtaacagtatcatatccgccattctcaactttttcagcatgctggcatggggccttggcctgctcggtgccgggatcgcagtcatggatttctgcgtttcttaccgcaccggcgggggcggcagctttctaggcaccggcatgaatatgctgcggctgctgatcgcacttttgaccttttcctccatcccggttctgctctttcagttttcgatggatatttacggctcggttcgcactgccgccgtcggctccatgtccggttccagcgcctctatctccgatctcgccaagggcgcgatcgacagcatgttccagtccgtgtacggctctctcccctccacacagcttaccggcggcatatggtcgtttctgaagcagctgcaagacggcttccaaatgaccgacgtaaccgacgcagcctttaacacgaacgccaactggtgggcgctcattcagcttgtcgtaatcgtgtgggcgatcttcaaaatctttttcggcaacctgaagcgcggtgggattctgcttatacagatttgcgtcggctccctgcacatgttttctttggcgcgcggctatacggacggtttcagcgcatggtgcaagcaagtaggcgcaacctgctttacagcttttgttcaaaacctgctctatctgctcgccctcattatgctacaggataccgaaaccaccaacctatattttgggttcggcctgatgcttgttgcggccgaagtcccgcgtattgcgcaaatgtttggaatggatacctcaacgcgcggcaacatcggctccgtcgtacacaccacgtcgtccgtattcatgttagtaaagcaattcgcccattgagaaaggaggctttccctttgaacgacgatcaaaactatttcttttaccccgaggacttgaagaaaaaggcacgctttttcgcgtggacaggcataaacatcacaataatcgcagcgtgcctcgtcctctcctgtttcatcttttttctcacgtttgcatggttccccttactgctcaccgtcatttttatgatcctaacggcaacaaacggcgagcgttctctttttgattacatatgggactacgtgaattacctattcatcgatcagctcgaatatatttggagcgaacccgaacctatccttgcaaggagtatgtcaaatgccacaacagaagaacccaaagactaaaaaggcggcactgagcacacagcagattttgaatatccggcagtttgtcccgctgcatgtgaacgacgatgcttacgccatcgaaggcgacgacggacgcctgtacgtttatcttatgcttcgcccggataacatttcggtgcttggccgaggagaaattctttcaaaaatccgaaacctccaaaacataatcgagaatctcccggacatgcaaaccctctgtgtttcctctacgcaaagctacgaaaacaacaagcggtattacaggcagcttgccaaatccgcaagaaacccgatcatcacccgtctctgtctgaaagaaatcgagcacatggatgagatcaatctcagcatgagcacgagccgggaatttgttattctgctgaactatccggcaaaacaatttgaggaagcgcggcacagcatcgtgcaggcagtccaattgatccgcgagcagcattatacggttcacatcgccgacaaaagcgaactgaaacgccttttctccatttattatgtcggcgatatttacagcgaggaaataccggagctggacggccagcagtacatcaggaagggggaataaaatatggtacgattaaaaaaacagcagcctgctccgcaaacgccggaagaagcggaactgtaccgtgtcaagtcgtacaaagaactaatttctccgggaatcttgtctttccgcaagtctcccgaatatttcatactcggcaattcataccgctgtgtatgggcgatccgctcctacgcagaaactgttcagaaagattccgcagatattgccgtactgcatgagctcggcgaaatggacggcgtaacgcttcacatgtacataagacacctgccggacatagagcgaaatgagatttttaaccgggcgcagaaccgaaccgcaatggaaaagaacacagcctggaagctgcacgagcagattcaggcggacgagcaaatgtccgtgctctcccgtgtgatccgggaaacgcagcggacaaaagaaagattcgtttactgcgccgtttttatcgagctgattgcagacgatcccaagcagctcctgtccaagcagatcgaagtgcgcagcttcctgtcccgtcacaaaatcgttgtcgataagctgcacctgcgccagttacaggcgtacaatacgatcaaaccgaatgggaagaattgctttggcacggagtttgagcgcgtctatccctcaagcagcgtcgccaacctctaccccttttcctactccggtaaggctgacccgcacggcttctatatcggccgcgatcaaaacggcagcaacattgtcgtggatttcgaccgacgcacgcaggataagacaaccggccatatcctgatcctcggcaactccggcgaaggcaagtcttacttgatgaaaagcatcatcgtaaataccgttgaggccggtaaaaaggcttatatcctcgatcctgacgatgagtacggcgaccttgtgcggaatctcggcggcacctaccttaacatgatgagcggtgaatatcagatcaatgtgctggagccgaggcggctgaccgatcccgtcgatgaatacgacggcctcgaagatgccgctgaacccgccgcattcaaagagagcaacacgctttcccagcacatcgcctatctgcgcgactttttcttcatgtaccgcggcttcacggaaaaggaactggatattatcgaaatcatgcttaccgagacgtatcaccggcgcgggatcgataaagacagcaatttctcgcggctctcctcgaaggactaccccatcttgagcgacctgtaccgggtgatcgagcagaaggtggagaactacgaggaggaggtcgaggatgccaaaaagcacaaccaccctatcatgtacagcctcgagcagctcaaggctgtcgggcttggcctgcgcagcatctgcatcggcgcggcctcccgctactttaacgggcataccaatatccccgatgcggatttgatcgatttcagcgtcaaggaagccttgaataccaacgagaacctcaagaacgccatgtttatgaacgccttctcctacatgagccataaattcctgacagaaggcgactgcaacctttttgtggatgagctgcacgagttcgtcgaaaacaggctcgctatttcctatatcaccagctttatgaagcgcggccgcaagaaaaactcgggcgtctgcatcggctctcaaaatgttgaagaccttctgcgcccgacggtcatcacgtatacaaagccgctgatgctgcttcccacacacagctttttgttccatccgggcatcaactgcaatcccggagaatttcagcgcgcactcaatgtacagccttgggaatacgatcttattcgcataccaaatcgtgggcattgcctctataagtgcggaaacgaacgctaccacctgcatgtgcgcgcacccgcatacaaagccgcactctttggcaccgccggaggcgcgtaaaagcggaagtacttccgctttttctccgtgccttgcggggattgaatttataaggagcttggtgtataataaaagcgaagaactttccggaaaggcagggtgagaaagaatggattccactaatctgtatagcattgacagcgtgtccgctctcctttttcctgttttcaagcgctataatgtccgcaaagccattctgttcggttccatagcgaaaggaaccgccaatgcgagcagtgatctcgatgtccttgtggacagtaacctgcgggggctgcgctttgttggcttgttggaggacttgcaggaagccgttcacatggacgtggatcttctggatgttacacatattcaaaagggatctcctgtagcggctgaaatccaaaaaacgggagttgttatttatgaggaatgatattatcattctcaaaatgcagggatacatcgaaaaaatccttcaatactgcacagacacaacgtatgaggatttcgagcgcaatacgcttttgctggaagcctgtgtttttaatctaagccaactcggcgagctcgcatcaaaagtagattccagctttattgacgcgcatccctccatcccgtggaagcaaatgcgcggcctgcgtaacaaaattgtgcatgactatgaaggtgttaatttgagtcttgtatgggaaatcatttcagaagatcttccggaattgaaagaccagctcaaaggcattgcctccaattaagtcgtccactcattcgagcgcgatcattagggttgcgctctttttaatttgtgttttgcagggaattaaaccggagccatacgaaactgcattcttgggcaccgccggaggcgcgtaaaagcggaagtacttccgctttttctccgtgctttgcaaaggggttgaatcgaagccgccggtgcggtataatagttttgaacaagatttcgcgaaaggatggcagctgctatggctgaaactgtatatacaaaaagcgaacttattgcggtactcagagatttcagccgtgagtttcaaattccagccgtttaccttttcgggtcctacgcccgtgatgaagcgacccctgaaagcgatgtggatattgtgatcgattccagaaatatccatggtcttctgaaatttgagcgggcaaggcagtatctttcaagccgtcttggcaaattgatcgacatgatctccatgcaggccattgaagacgagaaggatttcccctaccggaagtctttcatgttatcttatttgaaggacagagtgaaaatcgatgtataacagcaaggacatatccattgttcagcacatgaaagcataatgtattatttcaaacagctagggaggtctgttcatgccgaattttctaaatgaattgcttcaacgttatgtaaaagacatcttgcgtatatatggcaaggctctgcattctgtaatcctctacggttcctatgctcgcggcgatttccgcgcagattccgacatcgatattatgattttggttgatttgtctgatgccgaaatccacgaaaaaagcaggcgtctatccgacgtcacgttcgattataacttcgataatgatattgccattatgccgattgtaaaaaatacagcccactttaatcaatggctcagagcctatcccttctacaacaccatacgaaaggagggcgtcgagctgtatgcagcctaatttggacgatattggcggtgcccgtgaattagctttttatcggatcagcgttgcaaaagaagacttggattctgcggaaatcaacttcaacaacgcacattaccgtgcttccaacaaccgcgcttattatgcgatctttcgcgcaatatccgcctgccttgccctagaattcaaggcatacaagcagcacgcacaggtcatcggaaacttcaacaaagatttcatccacaccggcatcttcccaaaagagattggccgccaaatcagccgtgcacaggaaatccggcatgcaagcgattatgatgatttttatatcgtttccgtggatgaggccaaagagcagctggaagctgcaaaaacgatcgtcgctatgattgaggagtatttgcattcactcgatcagtccgaaaaataaaattccacctgtagtccagagagcagtcaaccgactgctcttttttatttccaaaagggaggtcaagcacatgtctggggcacgtctcatcgtaaacgcccgatattttcacatcgcccgcccgggtgaagctgcatccaagtatgcgcttgtcccggaggctgcggcaggtcttgtcaactatatcgcaacgcgcgaatccgtccttctgaacttctcggccgaatacgaacaaaggcccgccacacagaaacaaaaggacgcgatcgaacgcttcttggagtcatcgccggatattgagaagtcgcgtgaatataaggcgtatgcggagcatccgaccggtgccaacgcctcccgcctcataacccgggctacagagtatgtttttggtctggacgaggaaggcgatgtaaaagcgacccgtccggctacccgcgcgcagcgcgagcgcatccgtgagttcgtggaaaaggttccggctattcaggatacaccggaatatgcggattacctcgccagcgccacgcgcgagaatgcaagcgaggtgctctcccatgcgcttgaaacggcgctggaaagtgccgctgatcctgaaacgctccgcattatgctgaattacattgcagaacgtcccggcgttgtccgggacgaggtcacgcagcacggcctgttctgttcggacggcaccgcagacctcgaggctgaaaaggacgccatcgccgcacacaagggaaacatttacagctttgtgttctccctgcgccgcacagacgcagatgccctcggctacgacgggcaggagaaatggcgggatttgtttgtcaaaaaacagatcgatcttgcaaaggagctgcatgtccccttgaaggagctgcattggattgccgcagtccacaacacacggcatcacccccacgcgcacttcatcgcctattcaaacgcgcagacaacacggatgtacctttcgcagaacgcaatcgaagcgataaaatccgattttgtatcggagatctttcgggatgagcgctacaacctctttgccccgcgtgaagaaatccggcaggcgctttccgaccggctcgaacggctgcttacacagctggatcaaaacgccggtgcggaactctccgcgctgcaaatcccgcagcggctctccgagctgaaggaagccgtcttagcttccaaaggccgccatgtttacaaattcctcccgcagaatgtcaaggtgatggcagaccgcctgctggacggcttgagtactgtaccggaaatcaaagagctgctcacggagtacggcaagtaccagaaagagcttgaatcctattaccagatgcacccggatgaacctcagccgctctctgcggtcgccgcgcgcagcaacctatatatgctcaaaaatcttgtgatccgctgtgccctgcaggccgatacgctggatttagatgcgggcgatgtaaaaaccggaagtacttccggtttttttgatttcccagcagaaaccacgccgccgcagattgcggatattccgccagcagaaggctcgcacgatctgacggccgaacagaaacggcacaccagacggatcgattccgttcgggaatacaggccatccggaggaaacatgaaaacagaaccacctaaagaaccggccgcagacagctcgccggaggaacttttccggtatgcgcagtttctccgctatgaggaaaacaaaccggaggatgctgttctctggtacaaccttgccgatcagcgcggacacgctgaagccgcataccaactcgcacagcattatctgcgtcatccggcggaacaagacctgcgtctcggcaatgaatacctgctcacggcaaagctgcgctttgaaaaccttcttttggacagcaacaatgcctttctcattcaggacatcgacacaggcgcttcatatcaggccgccgtttcagaacatggcctgtccagcgagaacaaggcgaatcggaggcaaatgccgcgcgccgaatattttctcggcaggatttacctctgcggcatcgaactcgaaagcagcgacggcattgagcccaaggacattccccggctgcaggttccgacagacccgcacaaggcggccgcatatctcgagctggcctacaacagcggctatacgcatgcggcctactatctcggcaagctgcaccagcgcggcgacctgcatccggagcatgagccggattataggcaggctgcggcatggttcacaaaggaagaaagcagcgcttactgccggttcgcacttgccggcatgtatgagcgcgggcaaggcttcgaagcagacgcggccaaggcagccgagctctatcggagctgcttaacggacggcaacagctatctcgcttcggaatctgcctatgccatcgcgcagatgcagcattacggcagtttgccggaaaccgacatgcacccgctttaccaaaaggccgccgggatatggctcaagcaggaggctcccgaagcgcaaatccacgcgcgcctgtctcagatgtacgaacacggcctcggcgtcgaaacgagtcttcctaaagcgctggaacactgtttagaagctgaaaaatccgatccgtccccccgcctctcctaccgcatcgcacagctcatggaaaagagcggcctgccggaagacgcggtataccgcaaatacggcgaggctctggatgggatgctccgagaggaggccgatcccgacacccagccggatgcacagcgcatctaccgcatcgcctcgatgtaccgttacgggcgcggcacagaaacgcacacagccaaggcgctggaatggtatctcaaggacaccgaaaatgcgttttgccggttcggcgcggcgtcgctcctccggtacggtgaaggcgttccagccgatcccatccgtgcagaggcactgtacagaagctgcttgaactgcggcggcttcctctccacagaatccgcctatgcgctcgcgcagatgcagcgcggcggaatactgccggaaaccgatatgcaggcgctttacgcctccgctgccaaagtatggctgcaacagaaacagccggaagaaaatatccggctgcgtctcgcccggatgtttgaacacggcctcggcgttccggaaaaccgcacggccgcaatccgctattacgagacatgcagccctgcgcccgcgctttactacaagctcggccgcctgcatcagcagacgggcagcgcgcccgcccttttccagatttatttcgagaaggcgcttaacgggatgctccaagaggagcagaccgccgaaccggatgcgcagcgcgctgtacggatcgcatcgatgtacaggtacggcctcggcaccgaagtcaatacaactgaggcattccgctggtacacgacagcggctgaacgcggcagtgaatacgccgagatacagcggcagaagctcgccgagcaggtacagtcggcgcatgccagccgaagcatgaacgcagcctctcagctgctcagtatgatcgggaacgctctgcgccagcagattctccgggatcagcagcccggcgcacgggcggaccgaaagcagcgcaggcaggaacgccgtcttaaacacgcgctcggtcaaaaggaagaccacgaacaaatttatcaataagaaagttgtgtgagaaaacatatgaaaaccagagaaatgttaagcgtacagagaaccaaaaaggttattgaatacgtcaacgagcacggcggccgcgtctccattgtggagctcgcctctgtcctgcactgccattatacaaccgccgccagctacatcaaggcgctccggactgccgggatggaaatcgagcttaacgggcgcatccgcaatccgcgtgaaaagatactcgcctatatccagtcccaccccggcagcatctcggtcatggacgctgcctgcgagctgcattgcagctatgaaaccgtgcgcaagtacgtccggatattccagtccgagggcatggatattcagacgacaaacgaggctgcggaggaacattccgatgaaaatacacagtgattatatccccttgacgcaggcgcagatcgccgctgcgcagcatacagatattgcagaatacctacagtcgcgcggtgaaaagctgaaacgcgagggcgcgcattttatctggaaggcgcatgacagctgcgtgataaccggatacaagtggtatcagaacagcaccggcaagcacggcgctgccgtagcctttgtccagcactttttcggcatgagcttcccgcaagctgtgctcgagctgatccatggaaaacagatcagcctcgagctgtctaagcctcatcccccgcaaaagccgcctaaagcggaagcgcttccggtggcttttgctttgccccccagcgcgccggatcaccgccgcctattcgcctacctcacgcagacgcgctgcatttctccggatattgtctccgatttcctgctcgacaagctgatctatcaggatacttccggcaatatcgtattcgtctgctacgataaaaacgggctcgtccgtgccgcgcaccggcgcggaaccaatacagcgcaccgttaccgcggattcgtttccggcggggactttacatgcggcttttcctatgtttgcgaaaccgcagatacgctctacgttttcgaggcccctatcgacctgatgagctatatctccctgcaccggcacgagccgtggcacaggtcgtgctatctttctctcggcggcctctccgacgaagccctgcgccgttttctgaaggagtacccgaatatccgcgaaatcgttttctgccttgacaacgacgccgcgcagccggagaattggggacagatagctgcgcagaagtacgtccggcactacggcaaaaaatatacaactcgaataaacaccccgcacctgaaggactggaacgctgtactttgtgctgctggaaaggaggctgcaccgcgatgccaagcagtcagataatcgggctcactatcctcggtgttttgcttttgaccggtataatcgcgggcaccgtcggcagccagtacagcctgaaccggatcaagcgaaaaacggtcggcgacgggcagtatggttctgcacgttttgcctacgagagtgaaatccggcagtctaccatccgtatcccctacgatcctgtaaagtggcggcaaaacgtaaatcgtccaacagaacccggcatcatcattaacctcgaaaagcgtggcaaacggtgctttgcctatgtagacccgacggacaaccatgttctgatggtagccgggccgggcggcggcaaaacgaccacctttatgttccccaatatcgaatacgcgctggcgtgcggcctctcgtttgcctgcacggacagcaagggcgacatcctgcgcacgtatgggaagctgtgcgcgcagtacggttacacctgcgtgaacatcaatttccggttcccgacaaccagcgatccctataacttcctgatgctcgtcaacagatatatcgaccgctggaagtcaagtgggaatgtctcgcacaaaagccgggccgaacgctatgcaaaaagccttgcgcgctccataatccgcacgaaaggctttgacggcggcggacaaaactcctatttctacgactccgcagaaggtgttattaccgccgtcattttgcttgtagcgcagtatgccgaacccaaagagcgccatatcgtttcagtctttaagctgcttttagagcttttgcaggagagcaaagcaccgaagaaggacgagaccggcaaaagagtaccaagccgcacaaagctgcacgaaattcttgattatctgcccgaggacgacaagatcaggtggtttgccggttccgcaccgcagaccggaggcgcacagttttcctctgttatgacaacggccatgagccgcctgctttcctttatcgattccgaaacagagggcatcatctgccacgactcgaaagtcaccatcgaaaaaatctgtacggagccggtggctgtatttatcaccttcccggaagaggatgagacaaagcatgtgctcgtctccatgctcttgacccaaatcatcaatgaggctatcacctatgcggacgaaaactgcaatggcaagctggaccggcgtctgtacatctatgccgacgagtttggtattttcccgtatatgagcaatatcgtcggcatgttcggctccgcccgctcgcggaacgtgctgctggttccctgcatccagtctccggcacaaatcaaagtaacatacggggcggacggcgagaaaatcatccgcgactgctgccagaccgtcattttcggcggcttttccccgatgtcggatacagcggttgagttcagcaagctgatggatacgcagaccgtttctgccggttcggtatctaccaataatcagggaaacaatcttctcggcggttccaacaccgggcgcagcgtcaatatgatttcgcgcgcattgatgacgccggatgagctgcagcagcttgcatttggcgaatgggtggtaaaacggcgcggcaggcacccatttatcgccagtcttccacgatacgaccaatggggtatccaactggacgatccctatatctctgcgcagagaaaccaatcggctgcacagtatgcaagctgcggcgatctgtctgaaaaaatcagcaggcaaagcggaaggaaaaatacttcctccgcaatcgattcgcatccagccccggcagacaagcccagccgcgatccttccgattattgattgaaagttcaagaaagatgaggtgtaattccaatgaagtattttttactatctctatttgactggaaatttgaaggagcggatattgtcatggagtgggttgctttaattactgcattgggagcacttgtcaccttaattgtatcggttgtgcagactgcaaaagaaaaaagttctttgcgccgggatcacacagacatcaaagaaaaactaagtacagagcacgcaaatctaagcaaaaagcacacaagcctaaacaaggaacacgcaagcctgagtcaggagcattccgggattcaggaagccagccgtcaaattctcagcaaagtaacagaaatagacaaatttattgctgttgaagccgaaaggcgctctgcttcccaagccctgctctctgaagggcagcgtgaaattcgacatcatgttgaagcgatcaccagcctttatcgtgaattagagcgtgtacaaatcgaaaatgctgctttgaaagtagaaaatcaaaggctgaatcaagaactccatgaacgcaagctgaaacaggaacaagcgttagaatatgaagaacaggaaatgagcctgcaataaaagaaaatatccccacactccaagcgttccggcctcggctggaacgccttattttacccaaaattcgcaaggaaggagcctacagcatggacgcattcatcgcaacgaccgctgtcaccaatgccggattgtctgcaagagccgcgcgcctgtacgcgttcatgcaggaaaaccgcaattttcagaccgacatcttcatgtggcgtaaagcaaaaacctgcgcggccctcggcatcagcgaggcgacctatgcccgcgcgatccgtgagctgcgcgaaaaagagctcgtccgggaaactgtgcgcttctcagaaataacaaagcgccagcttgtcagctactaccatgtttgccataccggacacgctctttccgttgaatccgaagctgtccgcagcctttcgcacagcaccttttccgtgtacatggagatcgcgcgctgctgtggaaaggaaagctgggcggtcagccgccgcagccttgcaaaaaagctgaagctgtccatgcggacgatcacccgcgccgtgcgggagctggcgaccaaaggctttatcagcatgaagtcggaaaaccgtctccatatctgcggcaatcgaggccagaccttcaaccggttccgcctccgcttctcgcgggaacgatacatgcgccgcacgcgctttatggcctgcttcctgtacatactcggtacttttacctacgccacggcctcgcccgcttctttcccgactatccccctagacaaatttgacacccccctatactatatccccaaggttaatagtaaggagaaaaaaacaaagctatctcctatagctaagttaaaggaaatagctggaagaatcaaaaataaaatccggcaatggagacgctcgaggaaagccgccttgccggattaaggctcgatgcctgacaaaagaaaaagaaacaactgctcgtcctaacaaaacacgcagttgcttctttgcagataccaagtcctcgaagaaaaaaccgaggcttagtccttggtttaattatagagcttacgtgcataacttgtcaagtatcgagcctgaaaatttactgtaaaattgtcttttgacaatcatgtagaagtacacttccgcttttattctgtgtcaaaaggtataccttttgacataccgaaaaattgtgtgtcaaaaaccatgttttcctacttttgatatatgccaaaattacaggagaccttttgacacacatcacgcaaaggaggaaacgcgcctatgattattttctatgtgcgctgttcaacagccgaacagaatgaggcacgccagctcgaagacgccaagctgcacaaggctggtaagattttcattgacaaggcttccggtaaaaacaaagaccgcccgcagctcgcagctatgctcgcctttgcgcgggaaggtgatacggtggtttgctcggacatctcgcggatcgcgcgcaacacacgggatttgctgttcatcatagacgagctgcaaagaaagggcgtcgcatttatgagccttaaagaatccatcgacaccgccacgccgcaggggcagtttatcctgacggttttcggcgctctggcccagcttgagcgcgactgcatccgtcagcgcgccaaggaaggcatgttgattgcaaaacaggaaggacgtctcaaaggccgaccgcagatcgataccgacgagaaaaatttccgggctgtctgtaccctctggcgcgccggaaagatcaccgccgttcaggcgcagcagcgtcttaacatatctcccagcaccttttaccgtcgggtaaaaacgcttggagtatgaaaaaaagcggaagtacttccgctttttcgcatcactttcttccctgctctttaaggaacaccaaaatattttgttgggattcctgcggcagctcggagagctcagtcagaattgctatgtcaatgacactcccaagctccgcgctggattccgggatttctgcaaaccataagccttcaagatcatcctcacagatcacaaggccgtcgaaatacgcaataaccgttgcatatggattcaaattcacattttccaccctctaaatttactttgctattccattattcatgctatgtcaaggcagtaaaaagcggaagtacttccgcttttttcctattttcttttgtagtttctgcatttggcttccagcaaggaaaaatcattgcatctttgagctaacgaagtcgaatttcctttggtcagtttgtgattatacaacgtaaccgcatttttttgaatttttgtctgaatcgattttatgtaacgatattctgcaaggagtaaggatttataactcggatctttgattgctccgaaatctacatatacgcgttcgctgggtggtacaggaaacatgttgttcaagtttatcactgcatatctgaggactttaataaaatccatcccttccttcatgtttcggcttaaaagaagacaaaggagcaaaataatccattccatttacctgaagaactataccaatatactttctctgattagcttgccctttcttgctattatgaaataaatgcggtgcgtatggaacgaggtagtcaatatattgggtacgaatttcgtaaaatctaatattatccatttctcctccaagacaaagaaagaggcgggcattaagcccgccccataaagttacgctcgcgttcagagtagcgaaacactcacttgtaaatgtcttgcatatagagccaagagaagctcacgtaataaacgtctcatttatgggctgagatacacccgctgtatggagatacactatctccactcttattatatgcaaaaccaatcattttgtcaacagatcgattgtcaaaaagcggaagtaattccgctttttgcgacaatcacgcctgcgaaaaccattcgctctgcatatcgcagacgctgtgaatgggtattttctctccgcctacaaggataatctgtccggcaatttcgtctatcctccgtaccctcccggtcacggaaacataactactgcctgctttcctgtcacccgaccggaagcatacgaaatttgcctttggggtttcctcaagctgcgctgcaaatatgcgcagttcctcaattttatcaccgcatcgcatatctcatacgcaatcttaaatcatagccggtttccttgcctcaatatagaggtcgatgtcctccacgatataattagctccggtggtatgcagggcttcaaaacaggaatacacatagtcccacacacggtaatgggtaaagagttccgccacctgcttgcctgtcaagtgcttggcatttttgtaggtttccacacagtaaatgagaaaatctccttgcctgctcatattcatgcctcctccggtatctcaaagtctcctgtctttttttcctcgtcatacatattgaataaggtaagagggctgaaatgccatagtttggtgtcctcctgttccaacagagaatacaccttggattcataaaattctctggacgccgccatttcatccacagagtagttctcacaaatcaactgaacgacctgaggaaccaataaagttaaaatcgcttcaaattttttatcagccatcaaaattcctcctccggtacagtgtcaataaaccgcagataggacagagccttttccgttgtcaacaccaactgattatacagcttcttgattttgagctgttctagggtctgttcctttgtcaacacgccagcggtatagagggtaaacgtccggtacacatcatcattggccaccggcccaaagataaaatcataggctttcccctcataattaccggagcgattatccgacacaaaatccagccatgcttcttccggcccatcaaagcgcaggagtgaacattcagaaaaagcaatattctcgtcgatctcataaatgctaaccgccctatggccgtttttccggcgttttgtaaccttatcggcaaagctgattgcctgttccttattggttgtggtataaaagccaaacccaaaatccaaaaaacggttttgctggatcagcttcggttccgatacaaccagattactgccatgatataaaatcataattgcccctccaatgctttctcggcaatcgcacgttcctcctgcaaagaccgaatcatcgtttcaatatgcctgcgtttttctatttgctctcggattgcttccacatccttttgcggaatgtaccttgagattacctttttcccctcacgatacttcaaataaaagtaagtgtattgcttgaccttcttttctgaaacagtgcctttggggagcacccccaattcttcttgatattttaccagcatacgatcaatgcgctctttctcctgcaagatggtactcagaatcaaattcaattacatcacctatttttattatacacaacaaaagaagaactttcaatacttagttgtacatttcagtgagagtaacttttcattttcgtatgcaaaaacagtgcagatcactctgcaccgtcttgatctattattctgttttggaagcgctgacttttttagatcggcaaagctgtctatttttaaaaagcggaagtacttccgctttttgaaggcaatcacacccgcaaaaaccattcgctctgcatatcgcagacactgtgaatgggtattttctccccacttacaaggataatctgtccggcaatttcgtctattctccgcaccttcccggtcacggaaacgtagctgccgcccacttttctttcgtccggctgaaagcacacaaagctcacctccggagattcctcaaggtgatccataaggatgcgcagcttaacgttcagcgcagatagatcatcctctccaagctcggctttttcatcggttagccgggctgtttccttgatcgctgcaccgtagccggtcaacacctgaaacggggagaactgcgccgcccgttccagcatagacatcggctgtctcgttttcgatacatggtgcggcaggttgattatatcgtcgtattccccggtcatgccttataccctccaatctgcgaatttctgcctttggccgtcgcgccatcttccagattcatccctttcgtcagctaagttgccatatcaaatatgcatgatacaccctaaaataaaactgcgccgcccggaagagagccggacaacgcagtactctgcaaaaaatatgctttttgttcattcagaaggcatcaatgttgcagcctttatagtcaaattacgggatcatcatgcttttttatatctgctgctgggaaaatacaggtaaaatcagctccttttccaagttcgctggaaacagaaatcttgccgtgatgcgcctctacgatccacttgaccatagaaagacccagaccactactctccgagtttcttgcaggatccgcctgataaaatctgtcccaaatatgcggctggtcctgctgggaaatcccaattccgtcgtcctttacaaatagatgaatactatcatctgttttccgcacagaaacccaaatatggccgccaaaatttccgtaattaacagcattctccagcaggttccctaacaatcgtatcatcagcgtctgatccgctatcaaatataattcaggatcaatctctgtttgaatttcgatgttcttctctttggcaaggtcggtaaattcctctgccaccatttctacaagttcgctgaagtccacccgttccaaattgattttttctcttccctgatccgctcgggacaacagcagaagctgggaaatcatgtcggatacgcccttgactttccgttgaatcagagaaacttcccggcgtccttcatcgtccaaatggtcgccttgcaacaactcctcacattgcataagcacgacactaatgggggtcctcaattcatgggcaacgtcgttggtgaactgcttttcccgctgcattcctgcgtcaatcgtatcaagcaatccgtcaaaggttttagcaagtatataaatttcgtcgctgccattctcaaggtgaattcgtttggataaatccttttcctgttggatatcctgcacggtcttcgtaatttttgccaccgggtagagcgcccgtcggctaagcagataaccgcagatagctgtaagaaaaatcagaagcggaaacagaatgagtgccagccgcatagtataccggaaatcctgttccgcatcgctgatggagataattccccgaacaagcacaggatattcgtcctctatgttttgttctatgtcaaaaacataatagtcaacttctcccgctgtgatctttctgagattcccattttcaaaaggaaggtcataagcaaaaccatagggaatccgtccataaagcagatcgaagctgtctttatcatagacagatagataaatcccttgctccaaggtcatcaaatcagaatcaaaatccaagcgtccattctcatactcaatatcctcaactgtatcggcaacacgttcctccagcatattttctgcattcgcaagaatttcatgggaactcatcgaaaagagcagggcaagcacgacacatacaacaaacgccattaagcccgtatgcaggagaaccagcctgctttttaaagacatttttttcacggctcagcatcctttattacatatccatgcccgcggacggtatggattagttttttggagtacccctcatctacctttttacgcagataacggatgtatacgtcaatgacgttggagccgccggaaaaatcatagtcccatacatgctgttccagcttatcacgatccaacactattccagcgttttgcatcatgtaatagaggagtgcatattccttggaggaaagctgaatttcattctcactgcgaaaaacacggcgtgtatctatgtatagggacagatccgctacctttaacacattgcttttctccgtaaccggttttctcagcaggacccgcagccgggccaacagttcctcaaaagcaaagggctttatcaaatagtcatccgcaccggcatccagccccgttacccggtcctctatactgtctttagctgtcagtaacagaaccggcaccgcatttccttctttccgtaattcccgcaaaacgctgatgccatccattttcggcatcataatatctaaaatcagtgcgtcatattctgcgcataaaagataatcgaaaacctctttcccattgaagcaggcgtctacgctgtatccgttgtctttcaagcgtttttttatcagctggtttaggtcccgctcatcttctgcaattaagattctcatataaatccccgccttttttcagtataccatatgcgagcaagatattctaccttcccacacaaacagaaacccgcagcccattttctgcgggtttccattgtgctgaatcctgtcaggaaggctaatcccagtgttctacactccactcgataatagtaccggtggaagcatcaatctcaaattcatactccatacggttgtaatagatttctccttcataaatttgacggccatcatcatgatccaaatgaatgcggatatcgtttgcggtggcaccgggtactttagccaaagcaatactgctggctttatcagatgaaatcactgtcccgccggtacttccattgttttgagaataatgctcaatgtcgaaatcagaactgataatctcgccggtagagcggtcaatttcatagtcatattccgtctcgtttgcaaaaaattccacatcataaaccgcacgaccatcgtcataatcctctttcacccatataaactgcgtatcgctctccgctactccggcatctttcagagcaatgctctttgcctgatccttcgtgatggcagaagaggtattatttggtgtaaccggcgacttcaatgtttcagaagacgtggactcctcagagggagcagtgctggcttctatctgggaagaggtgtctcctgttcccgcattctcctgtatactttgactgtcaaggacatcataggacgagtgcaggatttcacctgagcttcttacaatgtcatagtcatagcttttttctgcggtcttaaactcaatttcataaacctgtagaccgttttctgaacctttatcaacccgcagggaaattacatcatcttcagtaatccccgcatgagagaaaacagcagctttggcttcctgttcactgagttccggatttttgggcgtgtttgctttcgccgccaacacaatagcggtactgccgccggctacgataatcacagctactaccataatgacgataaccttggagtttagtttttttaaaaactcaaatttcatgttctaaccttctttctatcggaattctactatcgactgtaactgaagtataacctataaaaattagaaaaagattaaaacaaaaaattttttagtttcaaatcaagtgtcttttcagataatatccattttaattctaaatctcggtttctgatacagtctttcatcttttcaaaacaataatcttgttccccttttttacctataggtgtttaaatagtccgttacgtccataaaaacctcgtcgatggagtagacaatgacatcctccggcgcgatgtatttcatgtagacctgataaacgcgcgtgctgtactccatgtagaacgccatcctcggcggcgcgatcagaaagtcaacggccagcgcgagatcggcccgcagctccgaaaagaagtgggacgagcccttgagctggtgtcccgaagccttctgcttccgtccggcgttggcttcccgaaccttttccttgacctcaaacagccgcgcccgccccggtatgccgaagctcttgagggacggcgtgacagcaaggcagatcgttttatccgtgcggctttcatccgctacgacgagatttgtattcatcggatcaagcccgcgttcccggcattctaccgacgcataaaacgattttaagtcgatcgcgatataggttcttccttccacgcctttccctccccgctgcgctttgtctgtgaatagtatagcatagaatcgcccaaacttccatagagtttccatcggcacacagcatgaaaaagcggaagtacttccgcttttatggaggtgatctttaatgttttatctgttgacggacagcatgaacgcaggcgacatcatccgggaggaaaccgggaagcactatatatacagctatacgcggaatacttgggaacgtaccgggatattctatgactattttaagcgagaatctcctctttaccgccagtaccacacgatctccgaagctgaggcggccgcccatatagagctgcggtgtgctgaatacgatcatcttctggctctcggtaaaaaggcgctgtttcaagcctgctttggccgcaggcggaatggacggcctctcatcgaagaaaagctcgagatcatcgggctttgcattgaaatcgaagcaaagattgtggcagcatactaccagctccatgaggcaccggcggcgttgaccgccgatgcactgcaaaatgcaggcttatccttgcgcatggcattcgcttatcaggctctgattcctgatccggatgagagccgtgcggattactacgcgcgagttcgggccaacccgattgcagcagacatcaaatacgcggagctgcaagtgctcgcccgggatggcgatcaccggcagcaggtattgtccgatttagcgctgttacagctgtaaagaataacccaaaccggttgatttcttcctacgacagaggcttaaaatgaatgtaaatgcaaggaggagcgaggcggcctataaatccacaggccgcctcgctcccttatgaggattacaccttgctttccggaatctctactgcgatcaacagatcttccggcttgcagtttagacaatctgcaagagcgtacaggtttgccacagaaatattggtgtttttccggcaccaatttcggacctgccgctccgagcaccggcaccattccgcgacttcgctctgtgttttgccgcttgtgcagattttcgagcgcacctttacggcgctgagatacatcacagtttccggtttgttctgccccatcggaatcacctcctcttatgcctttagcataagaggaaatggatttcctataaaggaattttacttcctaaatctggaaaaactatgttggatttatacacatatatgcgaatgataattcttaacaatatatattttcaagaatttttgccataaaaaagccaatggagtttcaaactgtgacgaaaacgccgactatcgctgaattggtacgtgacttgtttccacgggaatcgtatgtagtaaatgtactctctataatatttttcagcagctcgacattgccggacaagccaattaggggaattactcattttgagtagttccctttgcttttcccggcaaaagcggaagtacttccgcttttatgggtacaagtgctgcaataaatttttggaggcacattacatggaaaacacacaaaagacgtacacgattggcgaatggctggacacgtggctcatggattatgccagtccgatgctccgaagcagtaccattcaaaactacttgtacgcgcgcaagcgtctggacaagcactatcccaacattgaaaacataactttagaggctcttacgccgttggattttcagcgaatgctcaacgcgctggcttccgtttattccaaatcttctgtagctcacattaaggttgtctactgcgaagcctatcaggaagctgtgcggaataacctttgtttccgcaatccgattcgtgaggtccagattccaaagcatgcggcgcgaaaaaaggtttccggtatgactatccccgaacaagacgcctttgaaagcgtccttacgcagctctcatttatggatcactgcatgatcctaacttatctcctaaccggcctgcgaaggaatgaactgcggaacctccgctggaaagattggaacagcaagcaagactacatccaagtctgtgagagcaaaacagcaaccggcattcggaacattcccataatcccccaagtaacaagcatactgcacacgctggcacaaaggaaatcctgcgaatatatcttccatgtaaacggagaaaaaatgacagacggacatatacgttacatatgtaccaaagtttcaagaatcgccggaatacgtcatgtgacgccgcacatgctgcgccatacctttgcctcccgcctttttgaatccggagccgacctaaaaagcctcgcggagattctcggccacactgatcctgcctttacactgaaaacatatgtaactgtcagtcaggagcaccttgccgaacaaatgcggaaattgatccgcaaataaaaaggctgccgagaaaatcggcagctcaaattttaatttcttgtcaaaaaaatgcttgcagtacagtgcaagaagtgatataataaatctgtacaagagaataagccccacggcttcttcctctggacggcaatccgttggaagaagcagtccccgacagatttcgcacatctgaaaaggaactcgtgagacttgtattcctttgctaattatagcatacaaggaatctgtttgcaagagccttttcccgcattttgtcggagaaaggcttttttgtacctttgtacacgtctgtgtacaaagtaaaaacaccacatgcaccttgacaacctaaacaatcttcaaatactttcccgttgctgccgcaactatgactccatatgacggcaagccacagtgcagtcccgcacgacgcgataaagaccgagcacagatgtcggatagcttccggcaaggcgatgattcacaacggggacaatgatactcctgtccagccacagcgcaagcaatggggactgctcgagcacactaccctcgagaagctaagcattctcactcaagaatgtcttcgcttgtggatcagtacgctgctgatcgtttgaagattgagaagtctcaagattattagagaaaatattgcccaaaccaatgttttctcttgattgatgcgcacagtctaaatcctagactgtgcgcatacatcaggagaaaatcctatggtggagatggacgggatcgaaccgttgacctcttgaatgccattcaagcgctctcccagctgagctacacccccgtttggtacttcagcattataacacctttcagcgaaaaatgcaataccttttttgaaatttttttaggattctgtcggatcgacaaaaatcgttctgtaattcacgtaaatcaccatgcccggctttgagccctgtggctttgagacgtgccgtatctgtgtgtagtcgaccggcacctgtgcggaatccttcgcgcggctgtggcgtgcggccagaatcgccgcttcctccatcgcagcctccgtcggctcttttccgtcggtcacaagaactgtgtgcgaccccggaatgttcttggtatggaaccagatgtcgttgttgttcgcatccttcatagtcagtctgtcattctgccggttgttgcggccgaccagcaccgtgaagccatcccgcgttgtgaagcgaagcggtgcggaaaccggcgcggccttctggttctttttcccgcgctgccggcggacatagccctgctcggcgagctccgcgcggatctcgttgagatcccgttcgttttcagccagagccagcgattcaaaaacgctgtcgatataggtcaattcgatttttgcaagctcgatctgctccgtcagtttttcctccgccgttttggcctttcgataggccttatagtatttctgggcattctgctgcgccgtcagcgccgggtccagcgagatttcgagctcgctgagattttcatcgtagaaattttgcagccgaaccgtttttgcgccctttttgatcgcgtacatattcgcactgatcaaatcgcccatcaccctgtgcgtttcacgctgcgcgcacgcctcgagctccgccgtctgattcgcgatcttgcggttcaggcggtcggcgtggttcgtcagcagccgcaggagatcctgacttttgacacgcatgcgctccatctgatcgcgctcggcgtagaaatcgtcgagcaggccggagaagctctcctttcgcacgacgaccatcgaggcaccgtactggtggacgtcgagaaacgagaaatccttcggcttcctctgcaaatccgagaccatgtgcggcttgccggacgtttcgcgcacggtttgaatcagccgctttacaaaatattgcgtgcgctcccgttgctccggcgtcatgctgcggatgaaaagctcgccgccacggccgacgctgttctgaacctcgcgcgcaacgatcggcgacacgccctgcaaaacggcaagcagagccttcgatagctccatatcgcgcggcaacgcatcgatccgcccgagcacctcttcctcggaacacgcgagcatcgagagcttatcctgcggcggcggaagccggtacaaaaggccgggcagcacaagccgctcggaggacatttccgcatcgacgcgctttaaggcatcgatgattttgccgttttcgtcgactaagatgatgttgctgtaccgccccatgatttctgcggcgagcgtcagttccacatggtcgccaagctcgttgacactgtcaaagcgcagcagcagcgcacgctcgagcgccggctgctcgatgccgagcagctttgccccctgcaattttttgcgcaggagcatacagagcatcggcggctgcatcgggttttccacagggattttcgtcaggccgatccgcgcgctgttcgcacgggcagaaatcagcagcttatgggcggcgtcgaagccgcgaaacgcgaggatcagctcgtcgcggttcggctgaaaaaccttgtcgacgcgcgcgccgacgagcgcttcgctgagctctgcttttaaatggtggagaaatgcaccgtcgagtgccatgatcgtccacgctcctctctttgaaaagacggcacgggccacaaccccgcaccgatttaagtcatccgtgccccactccccgcagggcgcagtaaaaatcctataaaaattccatcggcgggcgctcgctcttggagacgcggaaccgcacgccgggacagcgctcagcgagcgccgcacagagcatctgccggtaaacgacctccgtgtggtagtgcccggcctcgtacagcgcaaggccgcgcatccgcgcctcgaccgcttcgtggtgtcggacctccccggtcacaaaggcatctgcgccgcagtctgccgcggcgcccacgtactctccgcctgcgccgccgaccacggcgaccgtgcggaccatgcagcttgccggcgtgtagcgcagcgcggagagaccgagtgcctccttgatctgcgcgccgaaacattcctcggtcaccggctgcggcagctcgcccatatatgcgatatgcgcgccgccgtccgggatgatcccccgcacgtgcccgaggccgagtgccgacgcgagcgcatggttcacgccgaacgggtacgctttatcgaggtttgtatgcgcgctgatcaccgagacaccgctgcgagcgagcgcatacggcatgctcccctctaaaagtgcgccgagcttgtggaaaatcaccggatgatggctgatgatcagccccgcgccgcagtcgagcgcctcacgcagcacacgcggcgtcacgtcgaggcagatcagtacgtccgataccgcggcctgcggattgccaatcaaaataccggtattatcaaaatccatggattcgcaaaagggtgcgatcgcatcgatcgccctgtaaatggtctccaccgtcataaaaacgcccccttaaatcggtatataaaccgcgcggatctcgcggaccgccgcctccagcgccgccgtgtcacggcccatatgccgcaggcccgcgcactggttctcaaggttgtgcagaacgctctgcgcataccgcgcgctatgagggcttccgggcagaagtccccccatatggagcatacgcagcggcagcgccgtttgtgcttcgccggtataaaaaaccgaaagcaccgtgtatatttttcgcccgtcgtacacggcctcctcgcggtcgatggcgaatccggctgcatacagccccgcacgcaggcggtcagccgtcgtcatcggctgcagaacgagatgcttctccggcgtgtgcagccacggcgtttctgcgacgatgcgcaaaatcaactcgccgcccatgcccgcgatcacgacgtcgtccgcatccgccgccgaaagcccggcaagaccgtcggacaaaacgcagcgcattctatcggaaacgccgaatcgcgccgcattgcgcacagcgctctcgagcggcgcggcgttcacgtcggcggcgacggcggaaattatcctgccgccttgcagcagtgcaatcggcagatagccgtgatccgtgccgacatcggcgacgcgaacacccgcgcgcacgaaatcagcgcatttttgcagccgcgcatccagcgtgattctctttttctctccggtattttccacggtatccctccgccggcggcaggacacgccgcaagcctctccgccgcgccctccgctgtctactccgtcttattatacagcctacccgcattttttgcaagcgaaagccagagcgcctccttctccgcccgttccggtacccagaagcagggcgcaaatataaaagtaggcgtgcaatgcgctgcgcgccatgctgtaataagtcgaagtcagaccggaaagatcgagaaagcgaaatgatgggtatactgccgcggatcccctttctctgcataagatttctcctgctcgcggccgtcggcagaagcgcggcaccatgcgcggcgcatttcgccccgacggagagccgcaggccgttcgtttactggctctatcaggcggcgactaccgtgctgcttttgtatccgcttttcctgcctctgcgggcagatgctgtgccatggccctgctgctccgttcgcctgtgctgcccgccgccgtattggtgctccagctcgccgggcatttcgtcattctcgctgaggagcagcgatgccttcaaaaatttggcgccgactatgcgcagtacatgaaaaaagtgcggcgctatttttgaaagcctccggcgcaggcacggcacgcttcgcgcttcggccgtacgctattcgccccgccgaaaacaaaaggcccggccttgcggccgggcaccgttgttatctttcctctttcatatgtgcaaagcactcactgcaataaacagggcggtcttcgcgcggcttgaaaggaaccgtagcttccttgccacaggcggcgcataccgctgtgtacatttcacgctccggctttgtggcgtttttgcggttctggcggcaggctttgcatctctgcggctcgttctcgaagcccttagaggcgtaaaactcctgctcgccggcagtgaatacaaattccttgccgcattccttgcagatgagagtcttgtcttcgtacatgttgatcttacctcgctttggtcttaataaaatatttgccccaaagcggatttgcaccgcctcattgaaaaaacaacgccaaaagctaagcagggcatatgcagcgcgtcatttccgccgcagctttttgcggacacgcgccatcgcattgtcaaacgcgcgcgccggtataccgagcgcacgctcgatttccgcgcgccgccagccgccgagatacagggagagcgcccttcgctcaaacggagagagtgaaacgtgcgccttttgcaggataccgtccagctcgtcgcggttctccaaaagcgcctgcggatccgtcgcctgcccggcgccgaggtcggccaccgcctcgatcggcaccgcgtggttgaggaaggaattcttcctgctcgcactgcgccgcaccgcactgacaatccggttgctgatgcaccggcccgcatacgtttcaaacgacgctctgccgtctgccgcatacgtattcgccgcatcaaaaagccccaaaagcccctcctgatagagatcctcccgctcaagcgaaaagatctcgcgaaagctgcacgccttgcgccgaatcagtgtcagataccgggcgacaagcgccggaaacacctccgtgttccccgcctgaaacgcctttacaagcgcttcatccgtttgctcctgatttccgacctgaccgatttgctgcatggctacgctccaaatgactactgtgtccttatcatactccaaactgtgacggaagtcaagaaaataaattatattatacacaaaatttgctcgggcagtttttcaatttataggaaaacgacaaattcacctgtgtattgccagaatccgacatttgatatataatgaaagcaaacacaatgtaaggggactgggctatggtttcaaaatcctacagcatggggcttttcggcatgcaggcatttcttgtcgaagtggaaacggatatttccgccgggcttcccgccttcgacctcgtcggtctgccggacgccgccgtgaaggaatcgcgcaaccgcgtgcgcgccgccctgaaaaactgcggcttcgatttcccggtcagccacatcacgatgaatctcgccccggccgaccggcgcaaggaggggccgatctacgacctgccgcttctgatctcgcttttaaaggtgacgggccaactcggcgcgggtacggaaagctgtgttttcgtcggcgagctctccctttccggcgcgctccgcccggtgcgcggcgtgctctccatggcgatggaggccaagcggctcggcttcaagcacatgttcgtccccgctgaaaacgccccggagggcgcggtggtggaggggctttccgtctaccccgtctcggatgtattcggcctgctcgagcacctgcgcggacgaaagccgatccagccggctgtacccggagagtccggcagcgccgcgggccaaacgccgccggacttcgccgacgtgcgcggacaggcacaggcaaagcgcgcgctcgaaatcgccgcgagcggcggccacaacgtgctgctgatcggcgcaccgggctccggcaaaagcatgctcgcaaagcgcctgccctccattctgcccgagatgctgcccgcggaaaagctggagacgacggcgatctattctgtcgccggcctgcttccgggcggcgcgtcgctcgtcgaaagccgcccgttccgcgcgccgcaccacacgatttccggccccggcctttcgggcggcggatcgctgccgcgccccggcgagatctccctcgcgcacaacggcgtcctttttctcgacgagctgccggagttttcccgcagtgcgatggaaacgctgcgccagccgctcgaggacggcactgtcaccgtctcccgcgtcaacggcaccgtggccttcccctgcggcttcatgctcgtcgccgcgatgaacccctgcccctgcgggtattacgggcacccgacgcgcccctgcacctgctcggacggcgcggtcgcccgctatctcggccgcgtttccggccccctgctcgaccgcatcgacctgcacatcgaggtgccgcccgttgattttgacagccttacgagcgcacagaaggaggaaagctccgcacagatcaaggtgcgcgtggatgcggcgcgggccgtgcaggcgcggcggtttcaaggctcgtccgtcacctgcaacgcgcagatcccgcccgagcggctccgagaggtctgccgtaccgagccggccgccgatgtccttatcaaaaccgcgttcgagcggttcggcctttccgcccgcgcctacgaccgcgtgctcaaggttgcgcgcacgatcgccgatctggacggcgccgaatgtatcgaagcccggcacgccgccgaggccgtgcgctaccgcacgctcgaccgaaaatactgggcaaagccgtaagcacacgccgttctacggctcaaaacacagttcgcccacgctcccgcttgcaccgccacaacggcacctgcacagtgccttgcgcttaaaatcagaacatatggacaaggcttccccgcctgccgccgggacgccctgcttcaagccgctgcaccgcaacgaaagagaagcgcccgatccgccgccggatcaagcgcttctcttttattttaccgcatggattttcttacaaacaggtcggcacatcgtagccataggtattcaccttgtagtttccgctgctcggcgatgcttcgctgtaattcgcgtaggagaaaaccttcgcctcggcaagccgcctgtagtagaggccgatgtagcaccggccgcccgcgacgtgccaatccagcaggttgctgccgaaggtgtacgcatccacatagcttagatcgcgcgtgaggccggacgtatcgctgaaagctacgtcgcccgcgcggacccagccggtcttgccgctcgccgtgaccttgtaccaagcgtgtttcgtgctgtcgtcgcgccagtagccgacgatcttgacgctgttgccctcgctcagtgagccgacactggaggacgagcttgcgtggtcgctgtacatcgtcagcgtggtcgaggtgaccttgccgctgtatgcgttcgaagaagaaagatccgaaggcggcacgaccgtgttcaaaatcaccgtgcgcacatagcagctgccgtacccgcgccaataggaggagccgacattgtagccgaagctcacgagcgcgtcaaactggctctggctcatcagaaggccgttctgcgaaatgaagtagttgacatccgaagtgtagccgccggaattcaccgtatccgccagcatggccttcgcctctgtgcgggtgaggttgttgtagaacgaggtgttcttcgcaaccacatagccgtagcccacggtcgggatattgccggccagcgtatccgggctgacgcccggcacatagccctcataggaggcgatattctcgagcatctcgtcgctgacgcggcgcgcctcgttcgaggtgctcgtcttatccgtcgtggaaacgacaaggatcgtaaactcctcgtaatcggaggagtagccgctgcccgaattcgaatacgcgcgcaccgtgtaggtgcccggcgtgctgatcgacgtagaggccgagaagatacggacattgttgtccttctgcgattccgattcatatgaggaggtctcgtacgtaccgacgccatcaatctcaaatttcacactcgatttctgcgtgtcggtgaccgccttaagctcgaagcccgcgccggcggaaatgatattcggcgtcgtgtaggcaaaccgcaccgcctcaggcgctgtgaccgtgaccgtgcaggatgccacttccttgccgtttgcacccttgccgatgatcttcgccgtgcccggcgcaacgccgtagacgaacagctggttgtccacgcccgcctcaacttttgcgacagacgtatccgagctcgcccagatcagcgagctgccggagccttccatgtaaagcgtcttatactgcgcgatcgtcgccgaggaggtggagacggaaccgctcgtgcccgagggcgtgtacgccgtcacatactgtgcggagacgtagcccgccgtgccgcccgtcgtgcggacatgcacccagtccttgttctttctgtcgatcacctcaagcactgtgccggaattcagaaccgtgatcacgtcggtcgatgtgctcgttcccttgcgcaggttgacgccggtcgtcgtgcgtacatattcgccggtaccgggctcgtcgctcgtgttgtcgtcctctttgccgtcgtccttgtctgccggcttcaccgaactgatgtcgccggaggtgatcttcagatactgcgccgagaagtagccctccctgccgtctgacagcttgaccttataccattcgctgttcgtcgcctcggtaacggtgaccgacacgccctcgtcgatcacgtcgatcacgccgtacgacgtgcccggaccctttctgaggttgatgtccgtcgtcgtcttggccgtcaccgttccgtcgcccggcgcgggggtcgggttcgattccggcttcacagaattgatgtcgccggaagtgatcttgaggtattccgtaaagaggtagccctccgtaccgttcgagagcttcaccttataccactgcgcgttcgtcgcctcggtgaccgtcacggttatgccggtatcgagcaccgtgatcacgccgaagctggtgcctgcaccgcggcgcaggttcacgtctgcggtcgttttggcctgtacactgccgtctgcgggcttctccgatgagccgccctccgacgtgattttcaggtagatcgagtagatatagcccgtcgtgccgttcgagagcttcaccgcgtaccactccgagttgctgcggtccgtaaccgtcagcgacgtgccggaggcgatgacgccctttgagctataattcgtgcccggcccactgcgcacgttgacgtactccgtcgttttcgccgcggtggattccgtggcagaaccggaggagcccgaggaagaactgatcgaaatatacttggagaagatgtagcccgtcgtgccgttcgagagcttcaccgcgtaccactccgaattgctgcggtccgtaaccgtcagcgatgtacccgaggcgataacgcctttcgaactgtaattcgtacccgggccgctgcgcacattgacgtattccgtcgttttcgccgcagtggattccgtcgagggcgcggattctgagccgccggaggacgacgaaccagaggatgtgatcttgatgtatttggagaagatgtagcccgtcgtgccgttcgagagcttcaccgcgtaccactccgagttgctgcggtccgtaaccgtcagcgatgtgcccgaggcgataacacccttcgagctgtaatttgtgcccgggccgctgcgcacattgacgtactccgtcgtttccgccgcagtggattccgtcgagggcgcggattccgattccgaggacgaagagctgctgccgctcatctttatgtattccgaaaacatgtagcccgtcgtgccgtttgaaagctgcacggcataccattccgaattgctcgtatccgtaaccgtaattgcggtaccggaggcgataacgcccttcgagctgtagctcgtgccgggaccgctgcgcagattcacgtactccgtcgttttcgcggaactgccggagccgccgagcgcgatatactgcgagaaaatatatcccgtaccggcagaggtcttaaccgcataccactcgctgttgctcgtgtcggtcaccgtaatcgaggttccctctgccagcactcccttcgaatcgtaattcgtgccggggccgctgcgcaggttgacgtactccgtcgttttcgcactcgtctcctccgcatacgccgcaagcgggcagacggaagctgtgagcagaagcgacagaagcagcgccgccgcgcgctttccgccttttcgcacggaaaaactcatcataaatcaccaatcctcactctatagaatcataacggtgcaggctggccgcaccaagccggaatccgtttccttcgcacagaaacggacagatatttcaagacatttacaattatagcgcaaaggttacaggattgcaacctttttttgaaataatgcgcctaaaagcgccggtaaatatttccattctgccgaagtgtgttttttatctgcgcagaagtgttcgaattccagatcccatctttctatacctcacaggcatcttttagaataatcaataagtattggacatgatccgatcatcggtttaaaataaatatgcaggcaaaccggtgcatgcggccgccgtcccccctgtactttatttttagaagggaacatagaaaatgagcaattacagctttaccgtgcgcgccaaacggtggacaaaatttctgttcagctgcgtgtgggagcggctgcacggcctcgatttcagcatggtctatgtcgggctgctccagcagaatacgcccgagtttcacggctacagcatgacggacgccggcgatatgaaaagaatgctgcaggccgttccgatcgaccccgcaggcgcagcctttcttgacgtgggctgcggcaagggcatgtgcatgcgctgcgccgcagcggccggctacaagcggatcgccgggctggacctcgacccctatctgctgaaaatcgcccgccaaaacatggcgcggctgcacctgcatgccgactgcatcgaggccaacgccgtcgaatttgccggctacgccgattacgacgtcttttacttctacaacccgttcggaaagccggtctttgagcgggtcatccaaaaaatcaaggatagccagtccgagcgcgaccgggacatctggatcgtctattaccatccggttttcggcgcgctgttcgaggacgcaggcttcgcggtctgccgcgagctgcacgacacaacgcgcgacaccactacgcgcctataccatctcgcgaaaagagacggctgaaaaagcggcgcaggacgtggccccgcagattaaaagcgcctcctaaaaaacagtaaaagcccgcgcggatacccgtgaagtagtcaatagttagtagacataaaatttcttatgccaccagttctgttctatacgggactggtggttttccttttagtttgcggacgggtcgttcattgttgaaatagtagattgcctgctcaatggtagatctcagatcatcacattcccagtaacggaagtgcttgcgcagcgtgtccttgaatcgcccccaaaagctttccataactgcgttatcgcgagggtttccggcccttgacatactttgaattacattgtattctttaagcaggttacaataacctgcggatgagtactggacaccttggtcgctgtgcaaaaggatttggtgttcggtgctcatttttcttttcagaaggcgctctgccggcttcataacgaggaaattgtcaaaagtatcgctgagttcccattccagaatctcgttgttgaacagatccaaatagcctgcaagataataccacttgccgttatgtttgatataagtaacatccgtcacaatcttctgcatcggcttctctgctttgaattttctgttcagtacgttggcatagcggatgtgttctaagttggttcctgtggccgcagctttcctgcgcctggtgtatccgtgaattctcagtcgcttcattgacttccaaacagtaggatcactgacgatccaaccgaattcaaggtacagcttatccctgatctggcggtatcccatcattgggtggtgggaatggatgtccaggacataactatccagtattttatgtgttttctcataccggtttaactgtcctgctcgcttcaaccacttgtagtagccgctgcgagaaacaccgtagatttcgcaaagttcgctgacagaatgtttgtctgtctgcttttgaatctcagcatacatctctcggatcatctttttcgggcatcgcccccttttcgttcgttccgtttttttaaacgaagtacctccgcctctttcttaaccagctctcgcttcagcagttcgatctggtattgcagctgctcctcgtaggtcagttccttccggcgctcataacgagataaaggattcccgggtttcttcttaacttccagcccggcttcaccttctgctagatactttctggtccactcttgtattaaccgatgactgcatcctgtttctctttcgagcgaccttgaagtttctcctgctaaattcctctttacaatagctaacttttcttctttgcttcgcatcgtgtatttaccagccatattgccacctccatgtctataatagcataaaaataatggtaggcacttttgtgtctaccattattttatcacttcacggatacccgtgcaggctttttgtttagatgcaggcgcaagcgccggctcacattttttcgacgatttcctttgtgtcgcgcgcgatgacgagctcctcgttcgtcgggatgacgtagacagccaccttgctgtcctcggcggagatcttcttctccacgccgcggacgccggcattcgcctctttgtcaaacttgatgccgaggtactccatattcgtgcagatgcgctcgcggagcgtgtcctgattctcgccgaggccggcggtgaacacgatcgcatcgacgccgttcagcgccgcggcgtagctgccgatgaacttctgaatctggtagacgagcatctcgtgggcgaggcgggcgcgcgggttgccctcatcctccgccttgcagatgtcgcggtcgtcgctcgaaacgcccgagatgccgagcaggccggacttcttattgaacaggtcggaaagctccgctggggaaaggttctccttctcggcgatgaacgtgacgacggaggggtcgagcgtgccggtgcgggtacccatcataaaaccgtcgagcggcgtgaggcccatgctggtgtcgatgactttgccgtccttgatcgccgtgatcgaggaaccgttgccgatatggcaggtgatgaccttcatgtccttgagatcgcggcccatgatctccgcgaggcggtggctgacatagcggtgcgacgtgccgtggaagccgtagcggcggatcttgtacttctcgtaatactcgtaggggacggcaaacatatacgccttcggcggcatggtggagtggaatgccgtatcaaacacgacgacctccggcaccgccgtgccgaacacgctcatgcaggcgcggatgccctgcacatgcgcactgttgtgcagcggcgcgagcgggatcaggctctcaatgccctcgatgaccgcgtcgtccacgagcaccgactcgctgaagatcgagccgccctgaacgatgcggtggccgatcgcggcgacctcgctgagatcgctgatgacgccgacctcgctgtcgagcagcgcgttcttgacctgctcgaacgcctcagtgtgattcttcatgcagatctcgatcttcttctcgcggccgtcagccgtcttatggccgaagatgcccatttcaaggccgattttctcgcagttgcccttggcgagcatctgctcgttgtccatgtcgatcagctgatacttgagtgaggagctgccggcgttgataaccagaattttcattttgtcttccccctgtggtattgatgcggtttttcagtgcgcaaaaataagcgcgggtgttctgcaaaacgcgcttgtaagataaattgcaatgctgtattatataatagtacaaatcaagctgaatttcaaggagttttcacgcaaaatggtcgcaaaaaacaggatttccggcgcaatttgtgaatttaatccgctgcacaacggacatgccgcgctgctccggcacatgcgggccgaaacggagggacccgtcgtctgtgtgatgagtggaaatttcgtgcagcgcggcgaagcggcggcgctcgacaaatggtcgcgcgcacgccttgcgctccagtgcggcgcggacctgctcgtcgagctgccgctgccgtgggcgctcgccggcgcggagcgttttgccttcggcggcgtgtcgctcctaaacgcgctcggcgcggacgcgctctttttcggcagcgagtgcggcaaagcggcgccgcttctgcatatcgccgaatacctgctctcccccgcgcttccagccgacctgcgcccctttctctcggcgggcctcccctttgccgccgcacgcgcgcgcgccgtcgaaaaggcgctcggcgccgattgtgccgcgctctgtgcacagccgaacaacattctcggcatcgaatactgcaaggcggtccttaaaaccggcgggaagctcgagccgcacacgctgcggcgcatcgccgtcggtcatgacggcagcacagccaggggccgcttcgcctcagcgagtctgctgcgccgcatgagcggcgaaatgcaggatatttccccctatgtgcctgcggagaccgcatcacgtatccgtgcgttacaggaggccgggcagtatcccgccgagctgcggcatctcgagcgcgcgatcctcgcctttctctccacggcatccagcgaagtcctgcgccgcgtgccggatactgccgagggcatcgaaaaccgcatccgtgcggcggccggcacggcgcagacgctcgaagcgctgtacgacgcggtaaaaacgaagcgctacagccacgcgcgcatccggcgcatcgtgcttgccgcgtacctcggcctgacggatgacctgcccgcggcgccgccgtatctgcgcgtgctcggtatgaccgcgcgcggtgcagagctgatccgcgccgcctcgccgtttctgccgtatatcatgcgcccggccgatctaaaaacgcgccccgccgaggcacgccgcgttttcgagcttgaagcgcgcgcagacgacatctacgcgctgtgcaccgcgcagcggcggcctgccaggctcgactacaccgccccgctcatccgcctatgagagcacccggctgcggtagcgtgcgacgtgctcgagtatgtgcccgatgtcccgcgcgcgatgcccgtctcctcccgcagctcgcgttaggcggcgtcgaggccgtcctcttcaggctcgatctttccgccgacgaaattcaaaagcctcttatagagatctcggcaccgccggcacagcagaagcgtccgttcatccgggccgaaaacagcgatcaaattatatccctgcatggatagtctccattccctgtatatcggaaaaggccgggcaaaagcccggcctttctgtgttctatgcttatttgacctcgacagtccagccgagcgtgtcctcgaccttgccggtctggatgccggtcacgatgtcgtacagcttctggctgatctcgccgatgccgccgtccgcgatctgcatgacctcgtcctcgaagcggaggtggccgaccggtgaaatgaccgccgccgtgccgctgccccagcactcctcgagcgcgccggtgcgcgccgcttcgacgagctcatcgacggagattttgcgctcttcgaccggcaggccccacagcttgcacaggtcgatgcaggaagcgcgcgtgacgcccggcaaaatgctgccgttcagcttcggcgtgacgacggtgccgttgatcttaaagaagatgttcatcgcgccgacctcttcgatgtacttgcgttcgacgccgtcgagccagagcacctgcgaatagccctcgtcgtgcgccttcatctgcgccgcaaggctcgcgacgtagttgccgccggttttggcttcgccgatgccgccgcgcaccgcgcgcacgtagtcgtcctcgatccagatcttcactgggtcaagcccgctctcatagtacgcgccgaccggcgagaggatcacgatgaacttgtaggtatcggacgggcggacgccgaggaacgggtccgtcgcgataacgaacgggcggatgtagagcgacgtgcccggccgcgtcggaatccagtctgcatcgacggcgacaagcgttttgatcgcgttcaggaaatcatcctccggaatctccggaatgcagagtcggcggttcgagttgttcgcgcgctcgatgttcttgttcgggcggaacaaaaggatgcggccgtcgtccgtcttataggccttcatgccctcaaacatctcctggccgtagtggaacaccatcgcggaagggtcgagggagatcggctgatacggcagaatctgcgggtcgtgccagccctttgccgggctgtactccatcacgtacatgtgatccgtaaaaatcttgccgaagccgagcttactctcgtcctgcggcttcgccttgggcgccgttgtgcgctcgattctgatttcctgcatagtaacacttctttcaaactgttttttgttattctatcacttcggcgcattttttgcaagtttccgcgcggaaaactgcataaaaaatcagacaaagaagcggcgcgccgcaaaaaagtttttgtttccttctctgaatcctaggcgcggatgcgcagccccttcgggtatttgttcttgagcacgccgcccgaggccttgccgaagcccgtaacgacgccctcggccgcgacggccgtatacccggaacccccctcggccgtaatctcctcgccgcgcagaaacgcgagcagccgcgggtcgtcgtgccgaaggtgcaggacgctgcggcactgcgccgcctttgccgccataaacataccgtgcgcgggctcgatgcggtttttccgcagctcgccgagttccacgccggcccgcaggacgccgaggccggaaagcgccggcagctccgcgggcagcagcaggatacggtcgcgcacccgcgcgagatgctccggcggcgcatcctcaaaaatctcgttgtaaagcgcacgcgccgcggccgccgtctgccggtccgcctgccccgcatgcggctgcacggcgcacgcattctccgctgcgtaccggaagcgcgccgcgaaatgcccctcgccgccgtccatcgggaaaatgcgcacggcgtccagcccataggccgggcggccgaaggaaactgccggcttctcgagcacaaagcccgggttctctgcgaggaacgcccgcacaacgccttcgttttcctccgcggagaacgtgcaggtcgaatagacgagtacgccgcccgcacgcacacagcgcgcggcgcttttcaggattgcaagctggcggaccgcgcaggtctcgacgtgcgcagggctccattcctgaaccgccgccgggtcgcgccggaacatgccctcgccggagcacggcgcgtcgacgagcacgcggtcaaaatagcctgcgagcttttcagccagcacatcgggatacacggaggaaaccaccgcgttcttcacgcccatgcgctcgaggttcgaggcgaggacagacgcgcggctgcgcaccacctcgttcgaccacagcagaccgcggtcctgcgtgagcgccgcgatctgcgtcgattttccgcccggcgcggcgcagaggtcgagcaccctttccccgggctgcggatcgagcagcgtgaccgccgaggacgccgacggctcctgcgaatagaacgcgccggcgtggtacagcgggtatgcagccatccgcgcgtccgccggcgcataatacgacagcggggaaaacggcgacggcacaagcggaaacggcagcgtttccgcaagcgtctgcgcatcgcacttcagggtgttcagccgtatgccgcgccggtgcggcttttcgtattccgcgcggaacgcctcgtattcgccgccgagcatgccgcgcatcctgttttcaaattccaagggcaattcaaaagccatattttttgcctttccccgcttccgcaccgcccgtgcataaacgcgcccagcgcgggaatcctagtaccggaagaggtgatttaaaatgaatcagaactacaacaatcagaatcccggccagagcgcgaacaataagagcaagcagggctcgaaccggaattccaacaagcaggccagcagccagaattcctcgaactgcagcggcaagaacaagacggagcagaacggcgaaaactgccgctgagcctaaccccaaaaagcagacggtcattcgccgtctgctttttccttttcttcctctgcctcgggcttcccgccgcggctctttttcagcgcgtgcagaatttccctgagcgtgcggtcgtccgagcgcatcggcttgaagccctcgcccgcgatctcgcctgcgtcaccgacgatgatgaacgcatccgggtcaatctcacggatgatctcactgatgcggaacacctcgaaacgccgcaccgcacagagcagcagctcgccctcctgcttcagataggcgccgcgcgatttcaagaacgtcacgccgcggtcgaggtccgtcaggatgcgctccgcgatctcctcgttctttttcgagaagataaagaacatcttgccgttgccgacgtccgtgccgtagaggatcgtgtcgatgatcttcgtcgatacgaaaatcacgatgcaggcgtacacggcgctttcaatgctctgaaagacgaacgccgaggccagtacgatgcagccgtccaccgcaagcatcagcttgcccatcgagagatggcgcaggcgatggttcaagagtcgggcgatcatatcggtaccgccggtcgtcgcgccgcgcataaagacgagcgaaagcccgacgccctcgcatacgccgccgatcagcgtgatgatcagcgcgtcgccgtggtacgccggcataaagagcgccaccacatcgatcatgaccgagttgagcacgatcgcaaccatcgtttttgcaaccagcttatagccgatctcgacgatcgcccacaggatgatcgggatattgatcacgaggatcacggtgccgatcggcgtgtcgaacagatagttgagcatcgtcgcaacgccggtcacgccgccgggtgcgatgttgttcggcgccgtaaagccgttgacgccgacagcatagatgatcgagcccacaaccatacagagcaggtcgagcgcgaggtcccgcgccttgcgcataatatttttctcacgcattctataacaccattcctttcaggatctgccggagcgcgaggccccggcaaaaagacggacggctcagccgccggcctgcgcggcctccgcaattttttcaaagaagagccgcagccggtccagccggccggaaaggtacagatagccgaagaggcactcaaaggccgtggcggcatggtaatccgcgacgctcgaattcttcggcacatgggagacgtgggcgttgcgcccgcgctggcagacctccgcctcctcctccgtcaggagcgggcggagctgctctgcgagtacctttgcctgaaactcacagcgcaccatctccaccgcgcgcgcgtgcagcttcttgaccgggcagttgcctctggagacgatatattcccggacgaacagctcatagacgccgtcgccgatgtaggcgagcgtcagcggactgagctgcttcggatccgtctggacattcataagcttttccaaatgcgcacctcttactccacaaaatcgaattcgaggtcgtacatgctgacggtgtcgccctcgttgatgccggcctcacgcagcgcgtcgatcacgccggtattgatcagcacgcgctggaagtattgcagcgactcgtagtcgtcgaaattgacggtcgcgatcagctttaagagccattcgccttccacaaagtatacgccgtcctcgacgcgaatgtccacctgcgtcctgccgaagtcctccgccggcttcacgaccgccggctccggctcaaactgagcgaccggcggcagcgtggagagcatctccgtcaccttgttgagcagcgggtcaacgccgtagcggatcgccgccatgatcgggaagaacgcgtagccctgcgcctcgacgaacttgcggaaatcctccacctgctcgtcgctcgtcaggtcgcacttgttgccggcgacgaccatcgggcgctgtgccagctcggggttgaacttgcgcagctcctcgttgatgatccggaagtcctccttcgggtcccgcccctcgctgccggaaacatcgacgatgtggatcagcatgcggcagcgctccacgtggcgcaggaactggtggccgaggccgacgccctgccacgcaccctcgatcaggccgggaatgtccgccatgacaaatgaaacgcccggctgcatgcgtaccacgccgagcaccggcgtgatcgtcgtgaaatggtaatttgcgatgtcgggcttcgcctcgctcacgacggagacaagtgtcgatttgccgacgttcgggaagccgacgaggcccacgtccgctagcagcttcagttcgagctgcaattcaaatgcttcgccgggcgtgccgggcttcgcaaagcgcggggtctggcgcgtcggcgtcgcaaaatgcgagttgccccagccgccgcggccgccctttgcgatcaccgtgtcgccgttcgaagacatatcggctaggatacggcccgtctccgcatcgcgcaccacggtgccgcgcgggaccgtgatgacgagcggcgcagcgctcttgccggcgcaccgcttgccgcggccgttttcgccgcgctcggccgtgtacttgcgcttgtagcggaaatcggcgagcgtcgagaggttatcgtcgacgcggaacacgatgtcaccgccgcggccgccgtcgccgccgtccggcccgcccgaggccacgtatttttcgcggtggaacgcgacggccccatcgccgccgtcgcccgcctttaccttgatcttagcaatatcaataaacataccgtatactttcctttccctgttcggccccgccggcggccaaataaaaatgggcctctccgcaaaccgaagaagcccgttttcatcgaagtattcggggcgataactccagtatgccccctaggtcaaaaattactgctcgatggagtaaacgctgaccttcttgcggtcgcggcccatgcgctcgaagcgaacctgaccgtcgatgagcgcaaacagagagtcgtcggagcctctgcctacgttctcacccggatggatgtgcgtgccgcgctgcttgacaagaatgttgccggcaaggacatgctggccgtccgcacgcttgacgccaagtctcttggactcggaatcgcggccgttcttcgtggaacccataccttttttatgtgcaaaaagctggatgttaatcttaagcattttatagccttcctttcacttgattcagacttccgtgtaggatacacagagattttccgggtactgctcctcaaggccgaggagatgcagcttaaagccggaaagcaaggtcgtgcacaggcgcgcatcccgctccgatatgcggaacagcatgtcgccctcctccgcgcgcagagaaaccggcacaatatgcaggatctccaaaacggtattcaccgtcatatacgccgccgaggaaaccgccgcacagagaatgtcctccccgctttccgcaaggccggcgtggccggtcacggaaaagccgagcagcgtcccctgcgcatcggcaaaaaattcagcgcgaatcattcagctcagccctgaacggcctcaatctgaatcttcgtgtagggctgtctgtggcccatcttgcgcttctcgcccttcttcggcttgtaggtaaagaccgtaaccttcttcgccttgccgttcttcagaaccttgcccgtaacgcttgcgccctcaacatacggagcgccgatcttcgtgccgttctcgtcgcagactgcgatgaccgggaactggaccgtttcgtcttcattggccgtgagcttttcgacatagatgacgtcgccgtactgaaccttgtactgcttaccgcccgtttcaataactgcaaacatatttctgcctgccttttccttagactcgctatcgctgggtgggccgcggaagcggctgcttgaaacccacaataagcggctttaccatcatagcatatgccccgcgcaaagtcaagcggttttgcgcggcttttgtactttttacagcggattccccgcccgcgctccaatgccctccggtttccacgcgctttcacccgccggcgcttacaaaaatgccctttcgcgcattttcgaatattttctaaaaataacctcgataaccggtgaaatcgcatgccgcttatggtataatgttggaacgctcgattgcagcgcatttcgatttcaggcaggtgttctcgtttttatgaaaaaagttgatttgctggagggctccatcgtccggagcctgacccgtctggcacttcccatcatggcgacctcgctgatccagatggcctacaacatgaccgatatgatattgatcggccgcgtatcgtcgaacgcggtggccgctgtaggcgccgccggcatgtacctgtggcttgcaaacggtctggccatgatcccgcgcctcggcgggcaggtcaaggccgcgcacgagctgggcgcgcaaaacacggaaagagccgccgcctacgggcaggccgccttccacatgggcgcgctgctcgcggtcctcttcaccgccctttgcattctgctgaacggccctctgatcgccttcttcaatctgagcagcccgtccgtcatcgcggatgcgcgcacctatctgattattgtggcggccgggttcgcgttctcgttttttaatcagattttcaccggcctgtttaccgccatgggcggcagcgtcgtggtgctgcgggccaccgccgtcggattggtcggcaacatcatcttggacccgctgatgatcttcggcgtcggccccttcccgcagatgggcgttgccggggccgcgctcgcgaccgttctggcgcaggcgatcgtaaccgtcatgttcctgctggcggcccgccgcgaaaccgcgcttttcccgcacatccatctgctgcgggccagccggcggcaggtctggaaggaaatcctgaaaatcggcctgccagtttccatccagagcatgttcttttccgcgctttccatgattatcgcgcgcatcatttcgggctggggcgatgcggccatcgccgcgcaaaaggtcggctcgcagatcgaatccatctcctacacaacggcagagggcttcgccaccgcgctcaacgcctttatcgcccaaaacttcggcgccggcaaaaaggaccgcatccacaagggctttaggaccgccatcggcatgatgatcctctggagctgctttaccacggtcctgctgatcgcatttcccgcgccgctggtgcagattttcattcagggcgacgagcaggtgctgcaaatcggcgtgagctacctgcgcatcatgggcttttcgcagatcctgatgtgtctggaaatcgcctcctccggcgcatttcaggggctcggccgcccgatgccgccctcgctggtcggcgtgatcggcaacgcggcccgcattccgctttccatcctgctcagcgccacggtgctcgggcttgacggcgtttggtggagcatcagtatctccagcattgccaaaggcacggttctgttcatctggtttattgtgattctccgccgctatatccgcgcggacggcacgcggctacctacagcccccgcccgcttccgcccgcgcagatccgagccgcgcggggaatagcgttaccagcaaaagggcgctgctttcaaacggcagcgcccttgctttttgcagtttttcggcgccgcccgaatcgaagctcactccgtctcggtcgttttttcgcccgtgtagagcagcgtgagcttttcctcgttccggatcgcctgcagcgcctgcttccgatccgacgcccggagcgccaaggacacgagcaggttgagcgccgtcaggatcgaggcgatcagaaactctcggtttctgcgctttttccgcaaggcagccgcgcgcccgcggccgtccttacgcatggtgcttatactcctgctcgcagtagatgcagcggtagcggtgcgttttttcgtcgcagagcgtgaagatctggtcaacgccctcctccgagctcgtgatgcagcgcgggttcctgcatcgaatcacgtttttcaggcgcttcggcagcacaatgttttcctttttgacgagcgcgccgtcgcggatcgtgcagaccgtgatgtggttgtcaatgaagccgagcacatcgaagttgatgctgagctcgccctcgatcttgatgatatccttgcggccgagcttgctgctgcgggcatttttgatgatcgcgacgcagcagtcgagcttatcgagctccaaaagctcatagatgcgcatgcccttgccggcctgaatgtggtcgatcacgattccgttttggatactgtcgatgttcagcatgatttctcctcctcgaaaagcccgggttcaatgccgagcagcatcaggatcagcgccatacgcacgtaaacgccgttctgcgcctgcgtgaaatacttcgcgcgcgggtcgctgtccacctcgaccgcgatctcattgacgcgcggcagcgggtgcagaacgatcaggtcgtccgcggcgagcttcattttttcggcgctcaggataaagctgtcctttaagcggatgtaatcctcctcgttgaagaagcgctcgcgctgcacgcgggtcatgtagagcacgtccagctccggcaggacctcgtccatcgtgcgcacctccttgtagtcgcagcccgagggcttcacgacctcgtcgagaatatagcccggcatgcgcagctcctccggcgaaatgaacacgaagcggatgttgtcccaccgcacgagcgacttgatcagcgaatgcacggtgcggccgaacttgaggtcgccgcacaagccgatcgtcaggttgtcaaggcgctttttctcgcggcggatcgtcagaaggtcggtcagcgtctgtgtcgggtgctggtgcccgccgtcgcctgcgttgataaccgggatgcccgcatactgcgcggcgatgcgcggcgcgccctccttattgtggcgcatcgcggcgacgtcagcatagcaggagatcatgcggattgtatccgcaacgctctcgcccttcgaggccgagctgctcgcggcgctcgaaaagccaagcaccttgccgcccagacgcatcatggcggattcaaagctcaggcgcgtgcgcgtgctcggctcgtagaacagcgtggcgaggatcttcccctcgcacttgtgggcgtaggcctcgcggttgtcggcgatgctgtccgcaaggtcgatcaagcgccgcgtctcctccttcgaaaggtcgagcgggtcgaccagatgtctcagcggtttgttcatttttcagccgtcctttctctgcgtgttccgcaaaaaacctccccggcctgcaccggagaggtcctcatcaatcttcgtcttcttcctcgggtgcatcccagttgtgccagacctgctgaacatcgtcgttgtcctcgagtgcatcgatcagcttctgcatcttgagaatctgatccgggtcggaaagcgtcgtgtacgtatccggcaccatctcgacctctgcggaaacgaaagtatagccctttgcctccagatcgtcgcggacgccgctgaaatcagacggctccgtgctgatctcaaacacgtcctcgtcggcctgaaaatcggatgcgccggcttcgagcgcgtcgctcatcacggtgtcctcgtcgaggccctcgcgctcgatggcgatgacgcccttctgctggaacatgaacgaaacgcagcccgtagtgccgaggttgccgccgaacttgtcgaaataatggcgcacgtcgcccgcggtacggttgcggttgtcggtcagcgtctcgacaatgaccgcgacgccggccgggccgtagccctcataggtcatgctctcgtaggcgttcgagttaccctcgcccgccgctttcttgatgatgcgctcgatattgtcgttcggcacattgttggccttcgccttggcgataacgtccttgagcttggagttcgccgcggggtcagcgctaccgccctccttgaccgcaacggcaagctcgcggccgatcttcgtgaagatcttggcgcgcgcgccgtccgtcttttccttttttctcttgatattattccatttggaatgtcctgacatactaaaacctgccttcaatcacacaaattcaagttattatagcacgtttccgcctcgatttcaatagccattctgcgggctttctcaaaaatcgggtgctcggcggcgattccgccgtctgtatccggcaggcagagcgtgcccgtgaggtgcgtattcatcaccgaaaagctctggcgcagcgttttttcacagatttccaccggaagcgggtcgtgccgccccatcgtgagcagcagcaccgcgcggcgcggcttaacaatcgccgggcgcacgccgcgctcaaagcgcgcctcaaagtagcgctggaagcggtcgagcacgcttttgagctgcgccgggaacgtgaggttgtagaccggcgacgcgatcaccagcaggtcgctctcccgcagcgcggcgtcgaagccgtcaagatcgtgcagcgcgcagccgtccgcccgcttgcagtacccgcaggccatacacggcgcggcgggctctttgcacacgttccgcgtctcgaccgtccagcgctccggcgaaaggccggagaggaacgcgtccagcagcctgtgcgtcgggccgtccgcatgcggcgacgcgaataaaacaagcgctttgttcaccatcttttcctccttgccggttacagccgtaccgagcaaatcaaacccattcagccgatccgccgcgcacagcacataaagggcagattcctttacaggcggcgtctcccgctgcccggcctctcggctatttttttactgcacacgagaagccgggatcccgccgcaccagcaaacgaaagcgttccgactgtcgcctgtattttcaaacatgtttgtataggtcttttgctttacgcatccgtgtccgcttttctgcgcgcgtcctgtaaagtcatacaccattacagacgccaacagacgctgccgcacgtgcagcagcgtccgaaaaggttcatccctttacaacgatattaacgagtttgcccggcacgtagatctccttgacgaccgtcttgccggcaatttccgccgcgatgcgtgcttccgcctttgcggcagtaagcgcgtcgtccttctgaatatcggccggaacctgcagcttggcgcgcacctttccgttgacctgcgcgacgatctcgaccgtgtcgtccttgcacttcgcctcgtcgtacttcggccagttctgctctgcgaccatgccgcagccgagctgcatcgcctcccagacctcctcggtcacgtgcggtgcaaacgggttcatcaggagcgcgaacacgcgcagctcacccttcgagatcgaacccttgtccgcgataacgttcatcagcgccatcagcgcggcgatcgccgtgttgaacttcaggttttcgatgtcgagcgtgaccttcttgatcgttttgtggaacgcattttccatttcggggcgaatcgcatcgccctctgccacgatgttctggagattccagaagcggtcgataaaccggcggcagcccttgatgccggcgctgctccacggcgcggccttttcaaagtcgccgataaacatctcgtacatgcgcatcgtatcggcgccgtactcgttgacgatgtcatccggattgacgacgttgccgcgcgacttgctcatcttctcgccgttttctccgaggatcatgccgtggctcgtgcgctttgcgtacggctccggcaacggcacctcgccgatgtcgtagaggaacttgtgccagaagcggctgtagagcaggtggagcgtcgtgtgctccataccgccgttgtaccagtcgatctgcttccagtagttgagcgcttcttttgaggcaaacgccgccttgttgtgcggatccatatagcgcaggaagtaccacgaggagcccgcccactgcggcatcgtatcggtttcgcgcttcgctttgccgccgcagtgcgggcaggtggtctccacccagtccgtcatctttgcgagcggggattcgccgttgtcggtcggctcgtaggaatcgacctgcggcagcacgagcggcagctcgctctcgtcgagcgggacataaccgcacttgtcgcagtgcacgatcgggatcggctcgccccagtagcgctggcgggagaacacccagtcgcgcagcttgaaattgactttgcggtggccaatgccggtctcctcaaggtggtccttgatgcgcgctttcgcctcttcgacggtcaggccgtcaagaataccggagttcaccatcacgccggcgtcgcagtccgtaaacgcctctttttcaacgtcgccgcccttgacgacctcgacgatcggcagattgaatttcttcgcaaattcccagtcgcgcgtgtcgtgcgccggcaccgccatgatcgcgccggtgccgtaggaaacgagcacatagtcggagatgaagatcgggatctccgcgccggtcagcgggttgatggctttcacgccttcgagccgcacgccggtcttatccttcgcgacctcggtgcgctcgaaatcggattttttcgcggcctcggcctgatacgcacggatctcctccagattggcgagcttgtccgcccacttctcgatgaacgggtgctccggggaaacaaccatgtacgtggcgccgtacagcgtatcggggcgcgtcgtatagacggtgagcgcatcgcccgccgtcgtctggaaatcgacctcggcgccttcggagcggccgatccagtttttctgctgcgctttgacgcgctccgggtaatcgacgaggtcgagatcgtcgatcagccgctgcgcataagccgtaatcttcagcatccactgggatttaaccttgtggacgacctcgctgccgcagcgctcgcagacgccgttgacgacctcctcgttcgcgagcacgcacttgcaggaggtgcaccagttgacggccatctcctttttgtaggcgagccctttcttgaagagctggaggaaaatccactgcgtccacttgtagtattccgggtcggtcgtgctgatctcgcggtcccagtcaaacgagatgccgagcgactggatctgctttttaaagcgagcgatgttcttcgccgtgacctccgccggatggacgtggttcttgatcgcgtagttctcggtcggcaggccgaacgcgtcccagccgatcggataaaggacgttatagccttctaagcgccgttttctcgcaacgacgtcgagcgccgtgtacgggcgcgggtggccgacgtgcagaccctgccccgacggataggggaattcgatcagcgcgtaaaacttcggcttatcggaatcgttcgaggcgtggaaaacgccggccgactcccatttttcctgccattttggctcaatttcactcggattgtacttcattgtcatcaccatttattaaacgcatcgctgcgcagattttcagttgggtttaaattcgatctcgagcttctcgccgtccgcccacagtcggtcgagatcgtagaactcgcgcgcatccgccgtgaagaggtgcacaacgacttcctcgtaatccagaatgatccaggaattcgagcggtagccctccacgcgggcgggcgcacggcccgccgccttgagcttttcctccagctcgtcggccagcgcatgcacatgcgtattgctcgtgccgtttgcgatgacaaagtaatcgccgagcgaggaaatactcgtgatgcggatcacattgatattctccgccttcttcgcatcgaggatctccgccgcagcctttgccagcatcaaagaatccatattcataccgaaacagctctcctttcctttactttccgtgccggaccgcccaaaccgcgtcgttatacgcgtccacggtttcgggcacgaccggctcccggtccttcaaaagcgcgccgaccgtgaaggcaatgccctcgacgatcgcccgatcaaggctcttatacgctgttttgcgcatttcctccacaccggggtagtcgcggtccttcgagataaagtccgccacaaaaacaaccttttcaagaaccgtcatattgtgccgccccgtcgtgtggtagcgcacggcgtcgatgatttcctcatcctccacccgcagaacgccgcggatgtaggcggccccgctgatcgcgtgccagctttttttcacggaaagctcgacatcgttcataattataccaaaatccgaaatgattttcaactgtttatccgcgggcgtatccttcaaaatatcgtggaggatgccggccgcctcggccttttccgggtcggcgccgtatttcttcgcgagctttaccgcctcctgcgccacgttcagcgaatgctcgaaccgcttttcggaaagcagcggcttaatcgcctgtatataggcctgcctgtccttctttttcacgctttgtaaagccccctctcctcgatgtagtcgatcacgccccgcggcagcaggtcatcgagcggaccgccgctctgaatccgtccgcggatctccgtggacgacaccggcagaaacgggatattctgcaggatgaacccgaacgccgggtgcgttttgcgcaccgcctcgccgtggcggatcagccgccggaagctgccgtaatcccgcggcgcggcacagaccgtcgcctcgcggaagattttttccggctcgtaccagcgctccacggtcagaaacatatcctcgcccatcagaagatagaaatcatcctgcgggtactgccctcgaagcgctgtaagcgtatcggccgtgtagctcttgcccgcgcgccgcatctcgatatccgaaacctccaccgggcattcggaaatctccgccgctgcgaggcggcacatcgcgaggcggtccgcattgcaggcaagcgccgcagccgccttgtgcggcggctgccccgttgggatcagcagcacgcggttaagcgaaagctgctcgataaacgcgcgcacaaggtgcacgtgtgcgagatggatcgggttgaacgtcccgccgtaaattccggtccgcatacagaccgccgcctccttttgccaaaatctccggccagcacggccggtttccgcttcttttgcgctttatgcgcgctttgccttcggcagaacgatcttcggctccttcgggtggcgcttatagagcgcaaatttcgagccgatcacctgcacgacttcgctctccgtctgctccgcgagcgcctctgcggcctcgcgcggggaaacgggcgcggtttcgagcaccttgcccttgatcagctctcttttatagatggcgtccgccgcctgcttcacaacgtcgccgtcgataccgcccttgccgatcatcaaaatcgtgtcctcgttgacggcgagcgcgcgcagataggctctctgcttgcttgtcagcataattcgttttctcccttatccttcagatatttttcgagcttttccacgaacagccgcagcgagcggccgcggtggctcacggcgtccttttcctcgggcgaagcctcaccgaacgtctttcccgcgcattccgcctcagcgcacaggaaaatcggatcgtagccgaaaccgcccgtgccgcggcactcgcgggcaatgctgccatagcagcagccctcggcctccagcacgtcgccgttcgggaacacgcagcagatcgcgcttgtaaaatgcgccccgcgcttgccgtccggcacgctttcgagcttctgcagcacggtccgcttgcgctgcccctcgggcgcgtagcgcgcggaatagacgcccggctcgccgttcagggcgtccaccgaaaggccggagtcatccgcaatgcagggcatgccggtttcatcacaggcggatttcgccttgatgtaagcgttttcgcggaatgtcgtgccggtctcctccgcctctgtgatggccgccgtgcggaccgtcacgccaagcggcgcgagaatccggctgaattcctcgaccttgtgctggttgtgcgtagcaataatcatgtccataatcggttgttcctttcagatgatcccaaaatcgcgcgcggcctgcgcccaatgctccggcagcaccgcgccgcccaccgccagctccgccgcgcgttccacacagaaaagcgagtaattcttgccctcgcagagctgcctgcggatcgcgcgcccccaaacgccggcgagctctgtcaggccgctgcggtcgagctcttcgacggccgccgcaacgtcgtacggcacctcgacgagctccggcacccagcgggcgccgtccgactcgagaaacgccatcttcgccgtgacggtctccatcgcctgaatgccgaccgcgccggggttcacatacattttcacgccgttccgcgcgacaagcggccgatgggtgtggccgctcatcagaagcggctgctcgattttcaagagccagcgctccacgttataggaaaacgggtggagcgtctcgcgtgttttctccggcgagccgtggcagaggcagatcgcacatttgccattcggatcgatgacccgcacattcggcattgcatcgagaaaggcgaggtctgccgccgtcaggttttggtacgtgtagagcagcgaccccgttgacatgccgaactgccagtcgctcccgtttttgtggtggctgaggatgtactcctcgcggtttcccttgatgaatatgcagtcgtgctcccgccgcgcgcggtataaaagttccatcgtccggtggggctcggcgcagtccgaaatataatcgccgagaaaaatccacaggtctgccccgcgcctttccgccgccgcaaagcaggcctcaagcgcaaaatgattgctgtggacgtctgaaaaaactgcgagcctcatggctgctccggccgctcgaacagcgcgcgggcaaaatccgccgcgtcaaacggctgcaaatcatccacctgctcgccgacgccgatgaacttcaccggcaggccgagatcctcacggatcgcgagcacgacgccgcccttggccgtgccgtccagctttgtgagcacgatgccggtcagcccggcggcctccttgaacacgcgcgcctgattgacggcgttctggccggtcgtcgcgtcgagcacgagcagaacttccttgctgcaccccggcaggcccttgtcgatgatgcgcgagatcttcgcgagctcgtccatcaggtttttcttgttgtgcaggcggcccgcggtgtcgcagatcacaacgtcgcagtgccgcgctttcgcggccgagatcgtgtcgaacacgacggccgcagggtccgctccctcggcgtgcttgacgattggcacgcccgcgcggtccgcccagacctcgagctgctcgatcgccgccgcgcggaacgtatccgccgcgccgaggatcacgcttttgccctcttttttcaggcgcgaggcgatcttgccgatcgtcgtcgtcttgccgacgccgttcacgccgatcacgaggattacggcaggctgcgtatcgagatgcagcccgttgtcgccgccgatcatctcggtgacgacctcctcgagcaggcccatgatcgcgttcgggtcggtcacgccgcgctccttgacgcgggcgcgcagcgtatcgcagatgtgctccgccgtgttcacgccaacgtccgccatgacgagcagttcctccagctcctcgaacagctcctcgtcgattttcgtgaaggcgtgcagcatcgaatggatctggctgctgatgttttcgcgggtctttttgagccccgccttgattttgtcaaaaaagcccatgcaggcacctctttccaaaagctattgatacgcggcgcccgggcttatttcagcccgagcttctcctccacctcgtgcgcgcgcagggacaagagctttgaaatgccctgatcctgcatggtaacgccgtacagcatgtcggcctcctccatcgtgccgcgccggtgggtgatcgcgatgaactgcgtgttgtcgttcatgcggcgcaggtaattcgcaaagcgcgtgacgttcacatcgtcgagcgccgcctcgatctcgtcgagcatgcagaacggcggcgggctgacgcgcatgatcgcaaagtagatcgagatcgcgcagagcgccttttcgccgccggaaagcagctcgatgtgcgagacgatcttgcccggcggatgcaccttgatctcgatgccggaattcaggatatccccctcgtccgtaaaagagagcgccgccgagccgccgccgaaaagatcgcggaaaatctgcccgaaatgcgcgttgatctcggaaaaacgctccgtaaactgcgactgcatccggcgcgtcagatcgtcgatcagcttcaaaagctccgccttcgatttttccacgtcgtcggtctgcgccttcataaaggtatagcgctcggaaacctccttgtattcgacgaccgccgccacgttgacggcgccgagcgccttgatcttgtttttgagctccgtcaggcggcgctgcgcggctgccgcgtcgtcgatcgcaatgccgatctcctcggcctcgcggcgcgtgagctcgtattcctcccagagcttcgcgatgatcgtgtcgtactcgcgctgcagcccctcgaggcgctcgcgcagtcgttcggcctcgcggccggcattctcacgccgcgcggtgatctcccgctcctttgcacgcagctcgcccgcgctctgctcgagcgcggagcgcttttcggcgatctgctgcacggccgcgcgcttctcctccgcctctgcacggagcttctccaccgcacggcggagcgtttcgatctccgcaccgcgcgcctcgatgcgctcttcgcacgcttcgatctccgcctcaagctgctttacgcgcccggcgcggtccgaaaggcgcgcttccagcgactgaaccgccgccgtcagcgtttccttatccttttcaaccgcgagcccgagcaggcggatctcctgcagccggcggctcatgtcgtcgcagcgctgcatctgctccgcgcggctgccggacatgccctccatcttcaggcgcgcttcagccgcctcgttttccagcgcttccgcctgcgccgcggcctctgcggccatgctttccagcgcggcgatgcgctctgtggcgctgccgcgctcctcgagcagattcccgtactgccgcttctgcgcctccatgtcccgctctgtgcgggcgatctccgatgcaaagcggatcttgtcctcgttaaaaaccgtcagcgcgctgcgcgccgtatccagctctgccgccgcgttcgaggccgcctgctgcgcctccttgaagcgcgatgcagccgcctccgcctccatgcgcagcttctgcgcctcactgcggatgcgctcgatctcgccggcgcggctcaaaaggcccgagttgcgcgccgctgagccgcccgtgaaggagccgcccgcgttgacgacctgcccgtctaggctcacgatgcggaaccggtagcggatgtgccgtgcgatctcggctgcgcggtcgaggttttccgccacaaccgtgcggccgagcagagaatcccggatgccggcatactgcgcttcacagctgcacagctccgaggcgacgcccacaaagcccggcaggcctgcaagctcgcgcctgtcgatcaccgtgccgcgcaccgtgctcagcggcaggaacgtggcacggccggaatcgcgctgtttcaaaaggcggatcgccgccttcgcggcttcctccgaatcgacgacgacattctgcatcgccgcgccgagcgccgtttcaagcgccaccgcgtattcgcgcgggacgtgcagcagccgcgtcaccgggccgtgtacgccccgcagattgctgcgctcccgctcgcgcatgacggttttgacgctctgcgtgaagccctcgaggttccgctcgagatcctcgagcagctttgcgcggcgcgcctgctcgttcgcgtcgagcagcagcttgtcagcctcggcctttgcggcctcggcctttttccgcttgttctccagccgcagcgcataaccctgcgcggcgttttccgccgcctgaatcttcgcctgcgtgtcctccgccatttcgcgcagcgtttccgcctcggccttgagcgattcgccctgtgcgcggctctcctcgagcgcggcgtccaccgaatcgctccgcgtgcggatctcatggagtgaggattccgcctccgcgcggcgcacgcgcacttccgccagcgacgcattgagcgctgcgagcgacgccgaaaccgcgtcgatctccttcgtcgcgccgtccgttccggcgcgcagtgcctcaagctccgcggtaaaggcaatgaaatcggaattgtgcccggcgagctccgcctcctttgcctgcaccgcggcctgcttctgctcgatctccgcccgaagctccgcctcagagcgcgtgttttccgcaatctccccgcgcagccgctcaatctgttcgcggtcgtgccggatgtcgttctcgacgaccgagatctcgccctccctgcgggtggcggtttcgtcggtcgccgccgcctcgccgcgcacggcctccatctgcgcggtgcagccgttcgtctcgaggaaattctgctcgatctgccgcgcggtctcctcgagcgccgcctccgcctcgctgtagccgctttcagcgacgccgatcttctcctccacctcgcgcacgatgcggccggagcggttcagcgtctcgagccagaggccgatctcgaggttctttttctccgcgtcgtaggcgataaatttttccgccttctcggcctgctcgcgcagcggcccgatgcggccctccagctccgcgaggatatcgcgcaggcgcacgaggttttcctcggcgcggtccaaacggcgttcggcctcctccttgcggtagcggaagcgcgagatgcccgcggcctcttcgaagatctcccggcggtcctcgcttttcgccgaaacgattccgtcgatcttgccctgcccgatgatcgagtagccgtcgcggccgaggccggtatccatgaaaagctcgtggacatccttgaggcgcaccatcgtcttgttgatgcggtactcgctctcgcccgagcggtaataccggcgcgtgatcgccacggtatcgccgtcaaaattcagccggcggtccgcgttgtcgatcgtgatcgtcacttccgcaaagccctgcgccctgcgctgtggcgtgccgctgaaaataatatcctccattttcgagcagcgcaaagcgcgcgtggactgctcgccgagcacccaccgcatcgcgtcgctgatattgcttttgccgctgccgttcggcccgacgaccgctgtgatgccttcttcaaatttcaggagcgtcttatccggaaaggttttgaagccctgcaattccagagattttaaaagcatcggttcacctgcctgtttcccttatcctgtatgttccgccggagagcgtctcatccggcctgatttcaacctcgaagcccatttttcgcagcgcctcgaggttgcaccgcttctgcccgagcgcggcggacagccggcgcgggtccaccgcgaccgccgcacttttcagcccgcgcgcccgaagctgcgccgcgatctctttgaggaagatgcggctgcggcacagctccatgaacgctggatgatacggcccggcgacgcggcgctcgagctcctcgctcgcgtgcaggccgacgcggatcagccgcacgcctgcgccttcgaccatcgggatcagccgcgcgcagagcgaaaccgccgcctccagtgtctgcggcgcatattcccccgcgcggtaccagtcgcagagctgcgtgttttcgagcacgatcgtcgggtaaatgcgcatcgtatcgggccgcaggctcagcagcgcgcgcgccgtctccgctgccttttcgtcggtatcgccgagcaaaccggtcatcatttgcagcccgagccccaagccgtatgcgcggatcagcgatgcggcgttttccacgtcgcgcgccgtgtgcccgcgccggtttttccgcagcacgccgtcgtccatcgactgcgcgccgagctccaccgccgtgacgcggtgcacctttaaaatctcgagccgctcgcggtcgacagcgtccgggcgcgtcgaacagcgcacgcccgcaaagccgtaccgcgcacaggcgcgcgccgccgtttccagcagcgccgtcatatagccgcggtcgatcgccgtgaagctcccgccgaaaaaggcgacctcggcctgtgccgtgcggctaccaagctgctgcgccgctttttgcagcacggcctcgacctccgccggcgccggctgcgcctgccgccccgtgatgcgccgctggttgcagaagctgcactgctgcgggcagccgttgtgcgggatgaaaaccgcaacattcgcgtgcttaatagcccatcagctccaaggcctcgcgcgccgcctgctgctcggcctcctttttgctgcgtccgccgccgcgcccgatcacgttgctgttcaggtgcacctccaccgtgaagtgtttgtcgtggtccggcccctgctcgccggtgagcacgtactcgaggcgctcgccggggttttgctggatgatctcctgcagcatcgtcttgtggtccttgaacgggcgctcgccggccgatttcgccgccggctcgatgtagtgcagcacgaagcgcttcgcctcctcgaggctgcccgaatcgaggtagatcgccgccgtaatcgattcgaaaacgtcggcgagaatgctcggccggtccttgccgccggagtgctgctcgccgtggctgagccgcagaagctcgcccgcgccgaaactgcgtgtaaagccgcagagcgatttttcgcagacgagcgaggcgcgctttttcgtcagcttgccctcgggcagctccgggaacgtcccgtagagaaactccgccgtgacaaaaccgagaatcgaatcaccgagaaactcgagacgctcgtagctctgcgccctgccgtggctttcgttcgcaaaggacgaatgcgtgagcgccgtcacaagcagcgcgcggtccttgaatttatatccgattttcttttcgaatgtgtcgagtgtttttgtatcgattgatttcataatgcaaaccttatatccgtttattcttccggcttctgcgccgccgcggcgatctcatcgatgatgttcgacgatgcgtatttggcgcagagcgcgatcgcgcttttcagtgtcgtcgccttcgcgctgccgtgcaccttaaagacaggcttcgagcagccaaggatcggcgcgccgccatactcgttgtagtcgagctgctttttgagcgctttcatgtccttgtaaacgacggccgccgcgagcttgtttttcgtgttcttcgtgaaaacacccttgaatttgtccatcagcgccagcgcgacgccctcgtacattttgagcagcatgttgcccgtgaagccgtcgcagacgaccacgtcggcggcgtcatacgggatctcgcgcgcctcgacgttgccgacgaaacggagatccgcctgcgccgcaagcagcttgtgcgccgcctgctgcagctcgccgcccttgtgcgcctcggtgccgacgtttgcaagcccgacccgcgggtctttgagccccatgaccttctgcatgtacacagcgcccatccggccaaactgcgcgagcatctccgggcggcactcgttgttcgcgccgccgtcgcagagcatgaaaaagccctcggatttcggcatcagcggcgcaaaggccacgcggttaatccctttgatgcgcttgacgatcagcgtcgcgccgacaacgagcgcgccgctgtttccggcggaggcgaaagcgtcgccccggccctccgcgagcgcccgcaggccgaccgccatcgagctctcctttttcgcgcgcatgatatcggtcgcctcgtcctccatggtgatcacatccgggcagccgatgatctcgaaatccgaaatatccacttgattttcctgcgccgtagcccgaagcctctccgcgctgccggtcaaaatgatctgcacgctgagctcgtccgccgccatgcggcagcccttgaggatttccgcaggggcgttgtcgccgccgaagccatccacaatgatcctctgttttgccattttcgttacacttccttttccccgccggccgccgggccggctccgttttcgctgaggcatgccgtaagaccgcgcagcgcgcgctgcgcaaaggcggcgtaccgcgcgcgcttgtcgcggatgtgcggctcaatcggcggaaaaatgccgaaattcgcgcccatcggctgaaaatccttcgattcgctctgcgcgacatggcgcgaaagcgcgccggacatcgtcgtctccggcagaatgaccggcgctttgccctcaagcctgcgcgccgcgttcatgcctgcgagcagaccggatacggcggattccatgtagccctccacaccggtcatctgcccggcaaaaaagaggttcgggcgggcgcggagcgagaagtccgcgtcaagcagccgcggcgaatcaagaaacgtgttgcggtgcatcacgccgtagcgcacgaactccgcgttgcgcaggcccggaaccatgccgaacacgcgcttctgctcggggaatttcagattcgtctgaaacccgacgaggttgaaaagcgttttttccgcattctccgtgcgaagctgcacgacggcccacgggcggtgcccggtacgcgggtcgcgcaggccgaccggctttagggggccgaagcgaatcgtatcgtgcccgcgctgcgccatcacctcgatcggcatgcagccctcgtaaaccttcggattcatcacgtcaaagtcgtggatcggcgcgcgctccgcggagacgagcgcctcgtagaacgcctcgtactcttccttattcatcgggcagttgatataatcgtcgtcgcctcggccgtagcgcgaggccgaaaaacagtgctccatatcgaggctttcacgcgtgacgatcggcgcggcagcatcgaaaaagctgagcctgccgccgcagagcgattcgatttttttggcgagcgcgtcgctcgtcagcggaccgctcgcgatcaccgtgacgccgtccggcgggatctccgtgacctcgcccgtgacgacctcgatgttcgggtgtgcgcggagccgctcggtcgcaagcgctgaaaatcggtcgcggtccacggccagcgcgccgccggccggaacgcgggaagcatccgcacaggcgacgagcagcgagcccatgcggcgcatttcctctttcagcaggcccgccgcgctgtctacgcgcgcggccttaagtgagttcgagcagatcaactccgcaaaaccggcgctcttgtgcgccggggaaaacttcaccggcttcatctcgaaaaggcgcacgcggtgcccggcatttgcgatctgccatgcagcttccgcgccggccagccccgcgccgacaaccgcggctgtatccttattctgcatcgccgccctcttgctcgccgtcctccggcttgaactcgtaggtgcagtccggcgtgacgcagtacagcgtctttgccttatccttcttctggagcaggaccttgccgcaaaccgggcagttcttcccggagggcgcgtcccacgagacgaaatcgcacttcgggtactggtcgcagccgtagaacacgcggccgcgcttcgatttcttctcgatgatcttgccgccgcacttcgggcagagcgcgcccgtatcgttgacgattttcttgaccgtcttgcactccgggtagccggagcaggcgataaatttgccgtagcggccgaatttcacgaccatcggcttgccgcagttcgggcagataaaatcggtcttatcctcctcaagctggatctttacgccgtccatttcctttttggcctttttgagcgtcttgtcgaaatcgtcgtagaagtcgtgcagcgtctccacccagtcggtttcgccgctctgcacctcgtcgagctccttctcgacctccgccgtgaacttcacattgacgatctccggaaagcgctccttcatcagctttgtgatgacctcgccgagctccgtcggcttgaaggatttgccctcgcgcgtgacatattcgcggctcgtgatcgtcgtgatcgtcgccgcatacgtggacgggcggccgatgccgttttcctcaagcgtcttaatcagcgacgcctcggtgaagcgcgccggcggctgcgtaaagtgctggttgcccttgagctcgcgcaccttgagcgccatgccggcctcgagcttcggcagatccttgcccttctcctcctccacgtcgcggccctcctcgtagagcaccgtgtagccgtcaaaggcgacgttatagccggacgccttgaagatataatcgccggcggaaatcacggcctgcgtcgtgttgagcacgcagtttgccatctggcaggcgacaaagcgctcccagatcagcttataaagcttgtattggtccttcgtcagcgacgcctccacatccttcggcgtcaatgcaacggacgtcgggcggatcgcctcgtggccgtcctgcgcgttggcgcgcgccttgaagtggcgcggcttcgcgggcagatagctcttgccccagcggtcgccgatgaactgcacggcctcctgcaccgcgtcctcggaaatacgcagcgagtcggtacgcatgtaggtgatgaggccgacggcgcccatgccggcgatctccacgccctcgtacagctcctgcgcggccttcatcgtgcgcttggcctgaaagccgagcttgcgggacgcctcctgctgcaaggtcgaggtgatgaacggcggcgcgggctgcttgttcttcttgcccttcttgacggaatcgacgcggaagtctgccgcctcaagcgccgcgagaatcgcgtccgcctgctccttgttcgtgatcttgatctcgccgctgcggtcgccgtagaacgacgcgccgaaaatactgcgcgagccctcggctgtcaggcgcgcgtcgatcgaccagtattcctcgggcttgaatttgcggatctcctcctcacggtcgacgatgatgcgcagcgcgacggactgcacgcgcccggcggaaaggccgcggcggatcgttttcgcgaggaacgggctcagcgaatagccgacgaggcggtcgagaatgcggcgcgcctgctgggcgttgacgagattgaggtcgatcgtgcgcgggtgcgccatgccctccgtgacgccggtctttgtgatctcgttgaaggtaacgcggttcatatcgcctgcatcaagcccgagaatataggccaaatgccacgagatcgcctcgccctcacggtcggggtcggtcgcgaggtagacggtgtcggattcctccgccgcctccttcagctcggaaacgagcttttccttgcccttgatgatcgcgtacttcggtttaaaattgtctttcacgtccacgcacagccttgccttcggcaggtcgcgcacgtggcccatcgaggcgacgacctcataatcgccgccgaggtattttttgatcgttttcgcctttgcgggcgactcaacgatgacgagcttggacatatatctagttctcctctgtctgtattttacgccgtgtatgcgttataatttaccttagtctgaattagtatacagcatcaaacggattttgtaaacctctgaccgggataagtgcgaatcttcccgaagagctcaagctctgtgagcgccgccagcacagcgcctgcggaaagtcccgtttccgcctcgatcgcagaagcgtgcttcggcgtgccgccgagcgcgccgaaaacgcgctgtgcgtccggcgagaaccccggctctgcctgcggtgcggccgccggctcctccggcgcacaatctgaaagggagacaacgcgcacgcgccggaccgggcgcgccacctgctccgcggcctgccgcagcgcttcggcgcgcgtatccgaccgcctgccggaaagcgcgcggctgatgtcctctgccgtgcggacacgcaccgcgccgtcggcggcaagggcggcgcacccggcaaacgccggatcatccccgccgataaagacaaaaacctcgcggttctgctccacggcataccgcgccgtgatcaaagcgccgctcttttccggcgcctccgccaccagaacgccgtgtgccatgccggaaatcagccggttgcgcgtctggaacgcgccgcgctgcacgggcgtctgcatcgggtattcggtgagaagcgcgccgccccggtcgatgatctcccggcgcaggttcgcgttatccatcagataaggatagtcgaggccgcacggcagcaccgcaacggtcggcgtgcggccgttgatcgcgccgcggtgcgcctcggaatcgacgccgagcgcgccgccgctgacgatcacggcgccctcaagcgccagcccgtagctgatctcccgcgcagcgcgcaggccgactgcccccgctttgcgcgtgccgaccacaccgaccgcgatgccgcctgaaatctcaggcagcgcgccgcgcacgtaaagggccgccggcgggttgtagatctcccggagcagcgccgggtagcccggcgtatccggcgtgaacacctgctggccgagccgcaggcagtattcgagcgcggcctccgcctcctgcgcgccataggcgctcagcgccgcaagttccttatccgagatgaacgagaagctgctccaaaggccgatgccgcccctgaaaaacgcttccgcactgcccatgcggcgcacaagctgcatgggctttgcgctgcccgcgccgaaagcattctgcatccagatccagtatacgcgctcatccatccgcctgctcccccttttccgcgccgcgcatcatttcccacagaacgatcgccgcggcggtcgatgcgttgaacgactccgcgcggccgcgcatcgggatcgtgatgcgctcggcgcaggccgcgattgcctcctgcgtcaggccattcccctcgttgccaatccacacggcccagcgtcccgcctcaaacgggatcgacgtgatcggcgccgcagcactatccggcacggccgcaagcgaccgaagcccgcgctcattcagcgccgcggcacactgcaaggcgctctcgtactgctcgaagccgagccgaaacaccgcgcccatgctgccgcgcagcaccttcgggctgaaaatatcgcagcacgcgccgaccagcgcgatgtgcagaacgccgagcgcctcggcggtgcgcaggattgtccccacattcgaggggtcctgcacgttttcgagcacgagcacgcgccgtgcggcctcgagcgcgcccgtccgccgcttcatccggcagacgcagaagatcccctgcgggttcttcgtatccgaaagcagcggcgcgatgtgcgcttcgatgcagtaggcacgttcggctgcgtgcagcacagggcgcaggtacgccccatatttttccgccgcagcctccgtataaaagcaggcggcgatttccgcgccgctttttgcggcgtccgcgcagagccgcgcgccctccgctatgaaaagtcctgcctcgcttcttttttccgccttctgcaaaagcgacgcggcatccctcacaacggggcttttgcggcttgtgatcctttctgccttcatgggctttctccctctcctcacagcaaaaaacgtgcgtccggagggtattccggacgcacggatagcttttttatgcagcagtctttgccttctcaaccagcgccttgaaagcagtctcatcagcgattgcgatctcggaaagcatctttctgttgagtgtcacaccggccttcttgaggccgttcatgaacgcggaataggtcgtgccgtttgcgcggcaggccgcgttgattctagagatccacaggcggcggaagtctctcttcttctgctttctgccgatataggcataattgccggacttcatgacggcctgcttcgccatcttgaagtgtctgctcttggaaccccaatagccctttgcgagcttcagaatcttctttcttctcttgcgcgtagcgagcgcacccttaactctagccatttatgtgaacattcctttccatgttgaattccggccggcgcataatgcagcgcccggccgcgaaagccgtgatgccggtctgcatgaagccctgcggctccacccggcggcgttttcctctgctctccgcttacgcgtaggggagcatcttcttgacggccttcacgctcgtcttatccgtgacggtcgtgccgcgcgcatggcgcttcgacttcgcggttttgccgtggccgttcagaaggtggctcgtatatgcatggccgcggatgacctttccgtttttggaaatcttcaggcgcttcttcgcgccgctgtgtgttttgagcttcggcattttaaagtcctccttgaaattgttatttaacgggcttgggggcgaggaacatcagcatgtttcgaccctcgagcttcgcgggcttttcaacatttgcaatctctgcaagtgcttcagcgaaacgcttcatgatgtctgcacccagttccggatgacccatctctctgccgcggaaacggatcgaaaccttaaccttgttgccttcggaaaggaaacgcgaggcgtggttcttcttcgtttcgaagtcgtgggtatcaatgttgagcgataaacgtatttccttgatctcgacgacgcgctggttctttctggcttccttctcgcgcttcgcctgctcgaaacggtatttgccgtaatcgatgatcttgcatacgggcggcgtggcctgcggagcaatcttgacaaggtcgagatttttctccgccgcgagattcagggcgtcgcgtgacgacataatgccgagctgtgcgccgtccgggccgatcacgcgcagctctctgtcgcggatctctccgtttatctgtagttcctgtttgctaatggttaagcacctccatcacacgtgcgataacttgttttcgcggctccatgcagcaaataagcgggcagaaaacctctgcccgcaaatcaactcagctgaaacgccgttcggcgttctctgcgatattgacctgtgtcagacggtactgcacgggtgtgagcgcatggctccgctttgtttcctgaatgattatactacgtccctctccccttgtcaacgggaaaataaagttttattcgaatatttcgcgcacgatgtcctcgatgcgcggctcgaccgcgtagatgttcttcggatcgtaacagcggatcaggccgatcattgcgtcgcgcgagctctcccccgccgccgaaaggcacagcgtgtgcccgtcccgctccaaaatcctaaagccctcgggcggcgcgccgtccggcgccgcgccctcgaactcgagcttaaagaccgtgccgcgcctgtatttttccttaaaaccgccgagcgagccgtcgaagagcttcgtgccctgatcgatgaggatcagacggctgcacacagcctcgatgtcgtccatgtcgtgcgtcgtcagaatgaccgtcgtgcccctttcgcggttgatcgtgcgcactgcgtcgcgcagcaccttcttgctcatcacgtcaaggccgatcgtcggctcgtcgaggtagagcacatccgggtcgtgcagcagcgcgatcgcgacgttcgccttcatcttctgcccgaggctgagctggcgcaccggctggtcgatgaactcgcccatgccgagcagctcggtgtaaaacgcgcagtttttccggaacacgtcccgcggcgtgtcgtaaaggctctcgtagaggtcaaaggtatcggagatcggcagatcccagtaaagctgcgagcgctggccgaacacgacgccgatgtgcttcgcgttctcctttctgtccttatacggcacgatgccgccgaccgaaaccgtgccgcttgtcgggatcaaaacgcccgaaagcatcttgatcgtcgtcgatttgcccgcgccgttcggcccgatatagccgacgatctcgccgcgctctatcgaaaagctcacgtcgcgcacggcacttttcaccctgtattcgcggtgaaacagcgattttaccgcgcccgcaaagcccttttcagtctgcgcgatgcggtaatccttgcagagatcccgcacttcaataaagctcattgcaattcccctctctttcttacgagcccgtgcttttgtaatggctgaggccccaattccacaaaacgacgctcaaagcgaagcagagcgcgccgaccgccggcgtgaggtacggcagcaccgccggaaagcccgccggcaccgccttaccgagcagcagcgaggccgggtagaaattcataaacgcaaacggcaggatgaacgtcagaataaattggatgccgcgcgggtaaacggtgatcggataatccgtgaactttttcatgttgaagagcaggaaatcgagcaccgggttttcgttgaccgtgaagaagctcatgacggagcttgcgatcagcgccgcagcctgaatgagcgccgcgccgagcaccacaagcacgaggcgcagaaggttcaaaagcgtgcacggaaagccgacgcgcacgagcgcgaacacgatgacggaaacggacagcgtaaaatggctgacatagccgatgttgaagcccgcgaacatctcgtggacgaacgggtgcagcggcttcgtgagcgaggcgtcgaactcgcccgagcggttttttccgctgagcccctgcgccggcgtgaagaaaaaggccgcgccgatcgaatacgacagaatcgagatgccgtagagcagaagcacctcgtccgccgtccagccgctgaggctttcaaagctcgagaccatgatgaacagcgtcgcaaacgtcgcgccgtagctgagccactgcccgacgatgcccgcgaaatacgtgctgcggtacgccgtctgtatgcggaacgccacgcggacaaaggcgccgaacagcttcagatattttttcatcttcgcaccctcccctcagccgccgttgaccgtcaggccctgcacggcgctgcgccacatgacacggtcgagcagcccgagcacgagaagccatgcgagcgcgcagaggatcggcacccacgcctcaccggccggcgtgcggccgagcaggaggttcaccggttcaaaggcgacatagcggaacggcagcacatagctgaccgtctgcagcgcctttggatagaaccacagcggcaccgccgtgccgccgaaaaatgtcgtcagcgcgctgacgtaccagcttaaaaaccagcaccgctggatgcggaacgcgagcaggccgaaggtgtacgtcagctcgaacatcaaaagcacgccgagcacgagcgacacaagaaacgccagcacgctgccgatttccggcgcctctgcgccgccgagaaaaaaagccccgactgcggcaaccggaagcacgttcgtcatcacgctgaacgcgttctttccgaaaatgtttgccagaagatagtatttgtacgagatcgggcgcagcagctccatcgcgatggagccatcggtcacggcggcctcgatcgtcgtcgcgatattcgcgcgcgtcagcttggacacgaacgtgtttacgatgacgaacagcaccatgtccgtgaagctcgtcccgctttgcagccccgtgccgagcagcgcgtgccacaggcagatctggatcgcaaacgacagcagcgtgctcgcggcactgctcagcgtcgccgcacggtaaatcatctgcgatttaaatgctttttggaacacaatccggtatttccgcattatacaacccctcccaagaattgtgcggataccgcggccttgccgcctttcccgcgtgcgcccgcgctgtttacagcggatttttattatagcagagcgcctgcctgcggtcaacgaaaaagccgcataaatcgtcgttatgcggctttttttcacaattcagttgtttccggcagaaccggctcgccaagccagaacgaatacagcatgcacgcggcgaccggcttcttgaacacgcaggccatcgcctcgccgtacagcacgagctgcgtgccgtagcgcgcccagagctccgccttgtctgcgcagcggtcggtcttaaagtcgatgatgtacagcctgccgttctcctcgaacatgcagtccaccgcgccctgcaaaatgacgggcagggcggcgtcctccccctcgagcgacgcgttgacgagctttgccggcacctgcgcgatgaagcgctgctccttgtagacccgctcggcaccgagcacgcgccggccgagcggcgacgcgaagaaccggcgcacgcggtgcagatcgacggcctgcgcctgctccgccgtgaggaatttcgcctccaccagccgcctgcgctccgcctcgggatcgtcggccgcggccgaaaaatctgagaactgcatgaagtcgtgcagcgcggtgccgcgctcggcgggcgtcatgcccttcgcgccgaggaaggccgggcgggagagcgccgcctcccgcgcgctttcggcctgcacggccgcgaggcccgaggcggaaaccttcgtcggcaccgcggtctgcgcggcaaacgggtagacgaaatcgatcgcgcgctcgatctccgccttgagcgccggatcggccggcgcgggctgcgccgccgcttccgcaggcttttccgcgggcgccggcgggcaaacgacgccaacctcccacggcgtatagtacgcgcgcagaacacagtcgctgtccgcgccgatgcgcttgcgcagcgcctcgccgtctgggtggcggagcgcgcagagcatcagccattcggagatgctcgcggcgctgctgaccgcatacggcgtgacgctcgcgtcctgcgtgatctgcgcggagagccgcccgagcgccgtgtcgaggctcttgaccgtcgagagcagaatgagcttttcgcgcgcgcgcgtcatcgcgacgtagaacacgcgcagctcctcggcggcggcgctatccgccgaagcgatcgcgatcgcctcgcgcggcagcgtcgtacagcgcgcgccggtttcagggtccgtgagccggatgccgaggccgagcgtcgggtgcaggcgcatgtcgtcgtactccggcacgaagcgccgcccgcagcccgcgacgatgcagaccgggaactcgagccccttcgacttgtggatgctcatgatgcgcacgacatcggcgttttcggagacgacgttcgccgactccatatccgagcggttctttttcagccggtcgatgaagcgcacaaagccggaaatgccgttgtacccgtaggcctcatactccgccgcatactgctcgagcaggcggaggttcgcgagccttccctcgccgccgggcatcgaccgcacgatgttttcaaagcccgtctcgtcgcagagcatcgtgatgaatgtatccgacggcatcgtggaggccagaatgcggtagcgcgcgatctcctcccgcacgcgcatgcagcgcgcatcctccgcgcggagcagcgagacgtacagcgtttccccggcgctgtccacgcgcagccgggccatatcgtccgccgtgaagccgtagaccgggctcatcagcaccgcgagcagcgggatgtcctgattcgggttgtcgatcacgcgcaggaacgagaggatcgtcgcgacctcgctcgccgagaagaagccgccgttcgaggccgcccacgcggggatgccgagcgcgcgcaggctctccgcgtagcgcggcgcatactggttcgagctgcgcagcagaatgcagaaatcgcggtaggccgcggggcgctccgcgccgttttcggtcacggtgaagcccgccgccatcatggcgcggatcatctccgcgatgcgctgcggctcgagcacctccgcgccgagcccgtcgatgtcgtcgatgaactcgacgcgcgtctcgcagccccgcttttcggggtagtcggcgccggccgcgagcgcctcgccgcccgtgtaatccacgccgccgcacgcgcgcgacatgagctgcgaaaacacgaaattgacgctctccgtcacgttttcgcgggagcggaagttgcggtcgagcacgacggtcgcggggtatgtatcggcgccgcggtcgtagcgcggaaacgcgtccttatagccgatgaagatgtcgggcatcgcctgccggaagctgtagatgctctgcttcacgtcgccgaccatgaagcggttgccgttgtcctttgagacggcgcggaacaggtagtcctgcgcgtcgttcgtatcctgatattcgtccgtcatcacctcgtcgaaccgcgcggcgaccgccagcgccgtctccgtgcggcggaagccgtccggcgtttcctcgaggaagagccgcagcgcgaggtgctcgaggtcgctgaaatcgaccaggtttttcgcgcgcttcttttcgccgtagaccgcgtcgaagcgcagcacggcgcgcgccagcgtttcagccagcgggcggatcgccccgatctcggcgcggcaggccgcgtcgtcggagatgaagagcttttggagctttccgacctcctttttgaccgtttcacgcatcgctttgatgcgctccttcacactgtccgcaccgcggtacacgccgatcttgccgaaggcgagcgtgcggaaggccgccgagacgtcgtcccagccgcccgcctttacgaggtccgaaagcccctgcaaaagcgcgatgtccgcgaggatgccgtcgccgtatgccttcaaaagctcctcactccccgatgcgagctcgtattcgtcgcgcgagagccgcagcgcaaaatcgagcacctcgcccgcgtggcgcagggccgttttgccccatgcggtctcccccgccggcacggaagcatccagcatattggtcatgtcgcgcagccatttttcgggaaaggggtggctgcgcgtataggtgaacagcttcaaaatcgcgccgatcagccgtgtgtcgttcttgtcgccgctgaggctgtcggaaagcgcctgaaaatcggcgtcgtcatacagctccgcaagcacctcggagacagcctcagccatcagctcctcctgctgcttgtccgacacgacggagaaatccggcgcgatgccgagcaggtagaagaactcgcgcacgatcgacgagcagaagctgtccaccgtgcagatctgcgcctgctggagcagaagctgctggcggcgcaggcgggcattttcgggatgctcccggatcagctccaaaagcctgcgctcgatgcgctcgcgcatttcggcggccgcggcctttgtaaacgtcacgacgagcaatcggtccgcgtccgtcgggctttcttcgtcggtcagccgctcgatcacgcgctcgacgagcacggccgttttacccgagccggccgccgccgaaacaagcaccgtgccgcgccgcgcgcgaatcgcgtcgagctgtgcgtcagtccatcgtgccgccatcgttttttcctccttccacctgcatttccatgcgcgcgagcacctcgtcatttttcatcgagacccgcgcggcggtttcctccgcgcgctccgagccgcacaccgccgtgtacgggcaccacgcgcaggcgttcaggttgcgcatcagcggctcggcggcgacgtctccgagcagaagcgtctgcgccatcgtcgcaatcaggcgctcgacatagcgcatcacgaggcgcagcgccggttcgctcacgagcgccgtgctctgccgcagctcgccgcttttgagcagcgtcaccgggatgaaccgcccggcgatgtccgcctccatcgcgcggacgatctcgatatcccgcaaaatcacgccgttcatgcggagattcttctccgcttcctgcatgagcttctcgccgctctctgtcttatcggaattgacggtcgtgaggaatgacggcatgtacagcacgccggccggcagaaggccggtattttccgaaagcgccgcgaggtagatgagcatctgcaggctcagcccgtagagcacgtcggtcagcttgaaatccttgtagccggtcttataatcgacgacgcgcacgtacgtgccgcggccgctttcgaacagatccacgcggtcgatcacgccgccgaccagcaccatgccgttttccgtcgggattttgagcggcgggaacggcgtgccgccctgcagctgcaactcaaagtattccggcttgaagcggctgacgcgcagctcctcggcgacgtggccgatcagcttcacggcggtgcgcgccatgcggccgaagcggtatttctcgcgggatgaaagcgacgcaaagccgcccatattctcgtccgcatatgcggtgatgcagcctttcacgcggccctcgagcgcctcggccggcatttcggtcacgtcgttttcccggtcgccaatgacctgctcaaagagatagtgcatcaggctgccgtactcgagcgcgtcgagctcggcgggccggcgctccttcgcgccgacagcgtagcggcagaaatagcggaagcggcactggtggtacgtttcaatctggctcgcggaaaagtaccgcccgcggccgaaaagcgcctgcgccgtgtcgggcgaaagctgcgcgccggccatgcggtcgccgccgccgaggcccgaaagccgcccggcatattccggccgctcgcggaacacggcgcggagcgtttcggctgccgcggtgttctctgcaaagagcgacgcggccttcgaaaacgccgcctcgggcgcgttcgcaaagaattccggcggcagatcccgcagcacggagagccccggcaccgcagcgcgcaccgccgagacgagcggcccgggcgattttgcctcgcggccgacactcgtcgggtacgtcaagtacagccgctccgaggcgctgcacatcgccgagtacgcgagaaattcctcctcgagcatgcggtcctccagcgcgtcggaaagcggcagttcgagcgccaaaagccggcggcgttccgcgtcgctgaacacgccgccctgcgcggggatcatcggaaattcgccccgcaccgcaccgagcagaaacacagcgcgcggcgcagactgccggatgcggtccgccgtgccgaacgtgatgcagtccatgctctgcgggatgtccaaaacgtcctcgccaccgacgatctcctttaagagccggccgtatttctcgccggtcaccggctgcgcgccgagcacgcccgccatctggtcgagcaccgccatcagcaggtcccagatgcggatctgctcggcggcgagttccgggtgcccggcattctcgagcgcccggcagaattccggcagcgtgcggtcgatctcaaaatccgtgagcagcgtgtagacggcggcggatacggatgcgccgtcccccgcgcgcagcgcgccggaaaagcgctgcaaaggctccgtcacgcgcgtgcgcagcgcattgagcgcgcggagcgcgtcggcggccgcgccgtccatcggctgcccgtagccgcccgggtgcttttcaaacggcgaaagccaagcggcacggccggaaagcccccatgtgaatatgtaatcctcgagcacggcgatctcctccgcagtgagcgccgaaagcccggttttgagcatgttgaaaagatcgtccgactgccagccgccggtcacggcatcgaacgccgaaagcacgaagcgcatcagcggctccgcgtcgaccgggcgcgcctcagagataaacgccggaatctcccagcgcttgagcgccgccgaaagcagccgcgtgtagcgcgcgccgtcgcggcagatcaccgagatgtcgcggtagcggtactgcccgctgaggatcagcctgcggatctccgccgctgtgtactcgacctcctcgtatggggtagccgcgtggaacaccacggcgccgcccgtatccgccgcctcgcccgcgccgagcgcgagcatgctttccaccgcgcagagcgccgcgttttggaagcggtgcgccgtttcacagcgaaccggcgcggcgaccgaaacgctgttttcccgcgcgatccgcagaagccgcgccgccgtgcggcgcaccggcgaaaacaggtcgcgcttttttgtatcgagatcatcgcagcagagcgcgacgcgcacgcggtccgcatggcggagcgcgtgcgtcaggatccggtattcctgcaccgtgaagccgtcgaaggcatcgaccgcgacgaaagccccgcggaagaaatccgggtgcgccgcaagcagcgcgtccagccgcgtgaggtcgtcgagcgggtcgagatacgtctgctgcacgagcgcctcaaacgcgccgtaaatcattgcgacctcgcggagcttctggcgcagtccgctgtcgtccgcaagcgcggagacctccgtcagccggtcgggcgcgatgccgcagagcttcatctcgccgaccgccgtcagcatcacgtccgtcatacgcccgcccgccgcgctcttttcaaacagcgtgagctggtcggcgcacgcctcgatcgcgagcgtcatcaaaatgcggcggccgccgtccgtaaggcgcttgcccgcctgcccgccgtagcgcaggaacgccgcctcggcaagccgtgtaaagctgtacaccttcacgcggttcgccgtctccacgccgtaggcctcgagcagcgcgcgctcggtctcgaacgtgtactgctccggcacgaccagaatcacgggcgccgctttttccgccgcaagccattcgcgcagccgcgtggtctttcccgttccggcgcggccgagcacaaactccagcattgtattccctccctttgcacgtgcagggggcactccgccgcctgcgctgtctgcggctattatagcacagatcgggtcacgcgtcaaaaaacgcgagcaggctgttgaagatctccgcggccttgaatttcacctcgaagcgctccgcatcggtgacgatcggctccgtgcccgcgggcaggtcgccggcgtcgctcgcgcccggcacgcagagcgcaggaaagacgacgcaccaccagttcttcccctctgccgcaccgagcgtgacgcgcagcgtgcggtactttccggcgggcaggctgccggtatcgtaagtacgggtggggaaatacatctcgcagacctcggcctgcgcgctatacggcacaccctcggcgcgaagcaccgcgtttgcagcggcctccagactttcgaggtgcgtgcagaccgcggcgagcgccgtctcgaaatcgtcggcatcgccgtaccagcgcccggcctcgagcagaacggcgtcgcgcaccttgagctttacggcctgatccgcatccgaatcggagtttgcgagcacgtgcaggcggatcacattcttttcgagcgcgtcgcactgcgcggagaaacccgtgaagctcaaaagcacagtgaggacgaagccgcaggccgcggcgcgcagaagcagatttttcttaaaaaatgttttcattttgcatttcctttcgcagcagcagtttttgaacaaatatctttgctgtttttcgtacaaaatatgggcaggaaatttacggaatatactttccgttccgaaaaaattccggtatactggttataccgcctgcaagagggaggatcacaatgaaaaccatttacctaaacggcaccatccgcacgatggcgggcagtgaaaccgccgaggcgctcctcgaggagaacggacgcatcctgcaaacggggcgcgccgccgacctgctcggcgcttgccctgcggcacggcgcttcgatttgcaggggcacgcgctgctgccgggtttcatcgacggccacagccatatcacagcgctcgcgcagacgcttctgctctgcgacctgcacggggcaaagtccttttccgaaatcgccgaacggctgcgggccttttgcgctgcgcggcggacagcgcccggcgaatgggtcatgggcttcggctacgacccgacagcgctcgccgagaacgcgcacccgaccgccgaatttctcgaccgcgcgctccccgaaaatcccgcgctgctcacgcacgcctcggggcacatgggcgttctgaattcagccgccatgcaggcgctcggcgtcacgcgcgacagtgaagcgcccgagggcggcgtgatcggccgaaagccggacggcacgccgaacgggtatctcgaggaagccgccttcacgcagctttccgcgcgcatgccgcgccccggcgcgaagcagaccgcgcagagcctcctcgccgccgagcgcatctaccttgaaaacggcgtcacaacggtgcaggacggcctgacgcgcgcgccggaatgggcgctgctcacaggcgtgcgggaaaagctcacggcagacgtcgtcgcctatgtggacattgcctgcgccgacctgctgcgggaaaacgcggcctacgcggacagctttcgcgggaagctgcgcatcggcggctacaagctgtttctcgacggctcgccgcaggggcgcactgcgtggatgaccgcgccgtacgctggcgaaacggattaccgcggctatccgatccacaccgacggcgaggtcgagcgctgtatgctgaaggccgtgcgcgagaaccggcagatcctcgtgcactgcaacggcgacgccgcggcggaccagatgatcgccgcataccgcaaggcgcgcgcggcctgcccgaacaacgtgcggcccgtcatggtacacgcgcagctcgtccggcgcgaccagctcgccgagatggcgcggcttggcatgctcgcctcattcttcgcggcgcacgtctatcactggggcgacgcgcacctcaaaaacttcggcgaaaagcgcgccgccgggatcagcccggtgcgcacggcgctcgcgctcggcgtgcactgcaattttcatcaggattcccccgtgctgccgcccgacatgcttgaaacgctgcgctgcgtcatcgagcgccgcacaaaggctggcgtccttctcggcccggatgagcgcgtcacgccgctcgaggcgctgcgctgcatgacaatcggcggcgcctacgcctattttgaggaaaacgaaaagggcacgctcgagtccggaaaaatcgccgacatggtcgtcctgaaccgcgaccccgccgcctgcccggcagaagcactcggggaacttcaggtactcgcgacgatcaaaaacggaaaaaccgtataccaaagggaagcaaaataacagattaaggaagggttgtactcatggaaaagaaaatttgggcgcagaatatcccgtgcgacgaggcgctgatccgccgcctgcaaaagcccgctgggccggtcgacgtcgtcctcgacactgacacctacaacgagatcgacgaccaattcgcgctctcctatatgatccgaaacggcgataagctgcgcgttcaggcgatttacgccgcgccgtttcacaacgagaaattcgtctccccgaaggacggcatggaaaagagcttcagcgagatcctgacactgctcgcgcttctcgggcgcgaggacctgaacccgtgcgtctttaagggttccgaaacctacctgcacgatgaggaaacgccggtgccctcgtccgccgcccgtgatctcgcggagcgcgccatgcggtacacgccggaaaatccgctgtacgtcatcgcgatcggcgcgatcacgaacgtcgcctccgccattttgatgaaccccgctatccgcgagcgcatcgtcgtggtatggctcggcggcaacgcgctccactggccggacaaccgcgaattcaacctcgcgcaggacgtagccgccgcacgcatcctgttcggctgcggcgtaccgctcgtgcagctgccgtgcatgggcgtcgtctcgtcgttcacggtcagcgagccggagctgcgccagtacctgctcggcaaaaatgcgctgtgcgaccacctcgcgcagtatgcgatcgaggaaggccgccgcacggcctcgagcggcacgtggacgcgcgtcatctgggatgtgaccgccgtcgcttggctgctcggcgaggactttatggcggatacgctcgtgcacagcccgatcccgcagtacgaccacacgtggacgccctccgcaacgcggcatttcatccgctatgtctacgccatccaccgcgaccggctgctcgccgatcttgtgcacaaactgaccgagtgattttcggcacgcatttttcgataaaatgcgtgcctttttcatttgtatatggtataattataaaaaatggaaccgctgtatgattctgcatagaaaggttggctgcctcatgaaaaagatgattctcgtgacttcgccgccggcatgcggcaaaacacgcctttcgaagcggctcgccgccgcgctcgatcacgtggtctacctcgacaaggacacgctgatgcccctttcgcgccagatcttcaaggctgccggcgagccctttgaccgcagctcggatttcttcgaggaaaacattcggaactacgagtatgaggccattttggatctcgccttcgaatcgctgcgctatgcggataccgtgctgatcaacgcgccgttttccagagagatccgcgacccggcctacataagcgcgctgcgcgaaaaactcgcgcagtacggcgcaaaactgtgcgtcatctggatcgtcaccgacgtcgcagtctgcaaggcgcgcatgatgaagcgaaaatccgaccgcgacacgtggaagatcgagcactgggacgaatacgtccagcgcatcaatttcgaaattcccgaggcgctgcgccttgaaaaccagccggacagcctcctgctctactacaattcggacgacacgctggcagacgcctcattcgcccgcatcctgccgatcctgaacgcaggctgaatgctttttgccgcgccttcgccgctttttaaaatccatcctgaaaccgaggtatccccatgtatcgaaccgatccggtctataaaacctgcgtgcaggtcttaaaggaagagcttttgcccgcgatgggctgcaccgagccgatcgccatcgcctatgcggcggccgttgcgcgccgcacgctcggcgcgctgcccgagcgcgtcaccgtgacagcgagcggcaacatcatcaaaaacgtgaagtgcgttttcgtgccgaataccggcgggctgcgcggcatccccgcggcggccgcagccggcatcgtcgccgggcgggacgagctgctgctcgaggtcatatcgagagcgaccgaggcggagcaggccgcgatccgcgattatctggagcgcacgccggtcgcggtgaagctctccgattcgccgcacattttcgacatcgatatttccgtcgaggcaggcggacatacggcacgcgcccggctcgtgcagcaccacacgaatctcgtccgcatcgaaaaagacggcgagatcctgctcgacgcggcctgcgaaacggccgccggagacggcctgtgcgaccggagctgcctctccgtcgccgggattctcgacttcattgaaagcgccgcgctcgaggatatcgagggcccggtgcggcggcagatcgaatacaacacgcgcatcgccgaggaggggctttccggaagctggggcgccaacatcggcaaggtgctgctcgacacctacggcagtgatgtgaaggtgcgcgcgcgggcgatggccgccgcgggcagcgacgcccgcatgaacggctgctccctgccggtcgtcatcgtctccggcagcggcaatcagggcatcacagcgtcgctccccgtcgtggagtttgccaaggagctgtgcgcgggctacgataagacgatccgtgctgtcgcgctttccgatcttgtcaccgtgcatttaaaatccggcatcgggcggctttcggcctactgcggcgccgtgagcgcgggctgcggcagcggcgcgggcatcgcctatctctgcggcggcggcctccgggaggtcgagcacacgatcgtcaactcgatcgcgatcgattccggcatcgtgtgcgacggcgcaaaggcctcctgcgcggcgaaaatcgcctccgccgtggacgccggcattctcggctaccacatgtacaagaacgggcaggagttccgcgccggagacggcctcgtgacgcacggcgtggaggaaaccatccgcaacatcggcacgctcgcgcgcgagggcatgcgcgaaaccgaccgcgagattttgcacatcatgtgtgattgacagctccctgccgagccccatatcaagctaaagcaaaaggctgtatgccgaccggttaccggcgcatacagccttctattttttacgattgattttctgttaattccgcgctcggctcaaacaaaatccattccgctccgctgcgcacggcgaggccgccgggcaccgctgtgtattccgcctgcagggtacggtcaaaattattttcgccgtcctgcgtcggcagcgcatctgtgtacgcggccacacgcgcggcgggcgcatcctccgcgacgccctccgccggctgcccggtcgaataatacaggacgccgcccgccatgagcgccgccggataatcgccgcccgtacccgtcgtttcgccgcagcctgcaagcaaagcggctgccgccagtgccagcgcaagaaaaaaacaccgtattttcataagcatttcctttccctgcctttttgcgcacctgcaacaagcccgcttcgaacaggtcgagcccggcgttctcctctgccttcctgcgcgcccgcaagaagcctcgagagcggcgcttaaaagcggaacagcccgccgcaggcgccggccaatccaaacgctgcggcgggccgtctcatgcgcgatgctgcggttttcccgcgttaggaacggctcgcctcatggaagttatcgacaaggccgctgtcctccgccacggaaatctgcccggtatacgtttcctctgctccgcccgcatcgattttcaccgtgaacgcatagaagccgtcgtcctcgtccagctctacggacttcacctgcacatcctgcccggcgtgcgcctcgtcgtatttgctgagcgtacggttactcacgagagaatccgcgagcgcctccgtagacagcgcggcaagcgacgcccggtactgctcagcggccgcatccagcgcttcgttgtccgccgccgaagcggtttccgaaaggaacgtcgtgtagcgctctccctcgtccgccgtataaaacgacgtcaggaacgcccgcgcggtatcctccgcgccttgcgcctccgccggctttgcggcgcaggctgtgaacagcacggcggccgccagtgcaaggatccaaattccactctttttcacagggcatctcccctttcagctcgggagcgtcaatcgttcggcgctcgtttttagcgcggtctgtacaaaattattttaccatttgcaaaaacatatgtcaataaaatatcggtttcgcgcatatattttttctgtcaacgctctttttctgcactctggcgcaggatttcctcggcgcagcgcaggccgtccaccgcggcgctcgtgatgccgccggcatagcccgccccttcgccgcaagggaacagcccgcgcaccgccggacattcgcggttttccccgcgcaggatccgcaccggcgacgagctgcgcgtttccggcgcagtcagaagcgcgtccggggcgtcgaagccgcgcagcctcttccccatttcccggatgccctgcgccatcgaatcgcagacgaaatcgggcagcaccgcgcgcagatcgcccggcacggcacccggcaaataggtcggccgcacatcgccgaagcccgccgtccggcggcgctcgaggaaatccccggcgcgctggcacggcgcgctgtagtcgccgccgcccgcctcaaacgccgcccgctcgatcgcccgttggaacgcgatgcccgcaagcggcccttcgccgccgaaatccgcgggcgaaacgccgacgagcagggccgcgttgctgttcacgccgtcgcgcgcaaattcgctcatgccgtttgtgacgacgccgcccgcctcggaggccgcgcccacgacggatccgcccgggcacatgcagaaggtgtagaccccgcgcccattttcgaggtggacgctcagcttgtaatccgccgcaccgagctgcggatgcccggcaaacgcgccgtactgcgcgcggtcgatcatttcggcgcggtgctcaatgcgcgcgccgaccgaaaagggcttcggctccatcggaatgcacgccttcgcgcagagcatgttgaacgtgtcgcgcgcgctgtggccgaccgcgagcacgacgtggcgcgtctccagcgtttcacgcgcgccgccgcactcgagcacgacgccctgcaccgcgccgtcccgcacgagcaggtccgccattttcgtgtgaaagcgcaccgtgccgccgaggattttgatctcctcgcggatcgcgcgcacggtctgcggcagcctgtccgtgccgacatgcggcttcgcatcgaagaggatttcttccggcgcgccgtgctcggcgagcgtttgcaggacaaagaagatccgctcgtccttcgtgccggtgttcagtttaccgtctgaaaacgtgccggcgccgccctcgccgaactgcacgttgcactcgccgtccaaagcgcgcgtccgccagaagcgctgcacggcgacctgccggtcctccaccgcgccgccgcgctccacgatgatcgggcgcagccccgcgcgggcgagcaaaaggccggcgaacatgccggccggcccgaagccgacgacgaccgggcgcagggaaagcgcaccggcccgcggcatctcgtagatgcggaccggcgcctgccggatacggccgtcgcgcagccgggaaagcagcttatcctcgctgcccgcggcctgcacatcgaccgtcacgatgaatttcacatcgcttttccggcgcgcatcgaccgaccgcctgacaagcgttaagcccttgagctgttcgggtgcaagccgcagctttttcgccgcggcccggcgcagatcactgcccgtatacccgagcggcatcgaaaggtcagctatgcggatcatcgtttttcccccttttttcggattgcctccgccgcggccgtaccggcggccatgccggtcgcccacgcgaaatgcaggttgtagccgccgcagtccccgtggatattcagcatctcccccgcaatgtaaaggttctttactttccttgactgcatcgtcagcacatccacctcaccgagcggcacgccgcccgccgtgatctgcgcatcctgaaagccctttgttcctgtgaccgtaaagttccatgactttacaagcgccgcgagcctttgaagctgcccgcgcgtcaagcgctttgccgcctgcgccgggtcgatcccggcagcctgtaccagcgcacagcccacgcgcagattcaaaacgcccgcgagcaggtcgcccgccgcgcgcaccgggtaggcggcgcgaagctcgagcagatagtcgagcacctcggaaaacgtccattccggcaggcagtcgagcgcggcggaaagcgccttatgcgcccggccgccgatcgtcccctgcgcgaaaaattccgccgcatagatcgacaggccaaaaacgcagatgccggagagcccggtatccgtgaactgcacgtcgccgctttcggcgcagatttcctttccgtccgcaagcagcgccgcgcgggcggcacagcgcacgcccgaaagggatttcgcggtttttcccgcgcagacgagctgcgtcagcgcaggataaagcggcgtgaccgtgtggccgagcgcctctgcaagcgcgtagccgccgccgcacgaatgcttcggcgaggccgcgccgccgcaggccagaatgcacgcggcggcctccagtgcctcgccgcctcccatttcaacagaaaagccccgcttcgtttttcgtatggccgtcaccggcgtgccgacccggcagaccgcaccgttttccccggcacagccgcgcagtgccgcgagcaccgcggccgcctgcccgctgcgggggtaaacgcggccctcgccgtctggctttgtcacaagccccatatcgcggaaaacgccgcgcaccatgtccggcgtatagtgtgcaagaagctgcgccgcggccgctgtatcgccgtggtagtgcgcgggtgcggcagcgagattcgtcaggttacagcgcccgtttccggtcgcgagcagcttgcggccgagcttctggttaccctccagaacgagcaccgcgccggcttttttcataacgcgcgcagcggcgcaggcggccatcaggccggctgcaccgccgccgattactgcaatatccaccttttccattgcgcccctcagataatcgcgccgagcaggccgtaggagaacaggcacatgatgatgtctgcgatcagcgtgccgccgaccaccgagatcatcgcgttcttaaacggcatcttcatcagcgccgctacgagcgagcccgtccacgcgccggtgcccggcagcgggatcgcgacgaagatcagaaggccgaatgtctcgtatttctcgatctgcgcgaatttgctcttgcccttttcctccagccggttgacaagctttacaaagcgcgtgttgcgcatccagtcgaagatcttgcggataaaaaggaggataaacggcgtgggcagaatcgtgccgataaaacagataatcatggcgggcagcagctcgatgttgagcagcttcgccgccacaataccgccgcgcagctcgatgatcggcatcatggagagcaaaaataccgtgagctctgccgggataatttcactgaaaaatttgacgagggtttcaaccatgcggaacctttcctttcgacatcctttgatttgaaaaacacaatattgaagtaagtatactaaattctgccgcctttatttttcctttaaagaattatcgcttacgatttgctgatatttcacgctgtcggcgcaccctgctccgctttcatcgccccgcacagcgcttcgagatcgccgaaggtgtagcccatgttctcccactccgtcaaaagttcgtcgagaatctcggcattcgtgctcgaggtgctgtgcagcagcacgacggcgccggggtgcacgcgcggcagaagctttgaaaaggcctgctccttcgtcggctggtcgtccacgtaccaatccacataggcgaggctccagaacaccgtggaataaccgagttcgctcgccatctgcaaatttgattcacagaatttgccctgcggcgggcggtacagcttcggcatgacctgccccgtcacctcctgaaaaagcgcttcgtttttctgcagctccgcgctgaagctctccgtatccccgattttcgacatatccgggtgggaatacgtgtggttgccgaccgtgtgcccctcctcgaccatgcgcttcacaagctccggctgcgtttcaaggtaattgccgaccaaaaagaacgtcgctttcacattgtgctttttgagcgcgtccagtatctgcgccgtgttgccgttttcaaagccggcgtcaaacgtgatgtagatctcctttttctccgtgtcgcccacatagagcgccccgtaatttttcaggtagtcgctcgtcgcgtttgcaaccggcggcgcgccttcctcctgaaagctcaggccccagtccgttatcgcggcgcttgcctcggcggcctcccgcccgccgcccagaaggaaaacggcgcccgcgccgagcagaacgacggccgccagaaaaaccggcacaagcctgcgcctgaataatctcccgatcatccaaacaacccctttcatacgctttgtaaaaacgtatgaaaaaaagaatgcggatatgattgcgcagcgcgccgaaatcctgtacaatatcttggaagcccttagaacattaagctttttgtaagcttttcatccccgcgtttgtaagggttatcctgtatattaaatttgataaaactgaggaggtctgccccatgccggatacagataagaaaaccatactggtcgtggacgacgaccgcgagatcgtccgcgccatctccatcaccctcgagcgggaaggctacagcgtgctgaaggcttacgacgggctcgaagcgctcgactgcgtgacaagccgcgatattcacctgattatcatcgatgtgatgatgccgcggctcgacgggctttccgccgtaatgaaaatccgcgaaaagaaaaacctgccgatcatcatcctctccgcaaaaggcgaggacagcgacaagatcatcggcctttcgatgggcgcggacgattacatcgcaaagcccttcaacccgatggagctcgtcgcgcgcgttaaatcgcagcttcggcgctacacgagcctcggcgatatcaacacccgcagcgacgactgcatcgtgaacgggcggctgaccttccggctcgacgagcacgtgctctatgcggacggcgagcccgtgaagctgaccgcgacggagacgaagatcgtggagcttttgatgaagcacccggggcgcatcttccccgccgaggagatctacagcctgatttggaacgagccggcgtattccgccgaaaatacggtgatggtgcacatccgccgcatccgcgagaaaatcgagatcaatccgagcgagccggaatatctgaaggtcgtctgggggctgggctatgaaatcgaaaagcactaatctcgcccgcggcgtgttctcttggttctgcttcatgctcgtcgtgttttcgatgatcttcgtgctgctctacagcttcgccgccttctcagcgtacggcgatgagattatcgacaagctcaagcagatctccgccacctacggcgagctgatgagcggcgagctgcgcgaactggacatttataaggaaaatgcctccagcttttttgagcgcctttattacggcacacagagcggggaaaccatctcgccggaggacgatatttccgaggaaggcgtccgcatcgaccgcggcgtgcagtatttcatttcggacagcgagagcagcaccgccgtcgcggccgtctacgtagaaagcatctcaaaggacaatctctacgcgatcaccgattacagcaaggatcccgccggaaaaaccgtgacgaacgacacaaattgggacccctccacactgccggagggcttcaactatctgttccagtaccgcggcggcgtcgccgagatcttccaccggcaggcagacggcacacttatgagcgttttccgcagcgatcagccgggcgcctactatacggatacgctcgcctacacgctcgaatcgcttcacagcctgaaaaccccgccggatatttccttcgccgtgcgcacaaagcccgaatcgttttacgcctcgaacgaaattgtcagcagcgcgcaggcctatgccaaccagcttatgttccagatggttctggtcttgaccgctgccgcgctgttcattctgatcctgatcctttccttcctcttccggcgcgaccgcaagctctttgaaacctacctcgcgcacggcctcaaatggatctggatcgagatcaagatcatcgcgatgctggtctggagctttttgattctctcgatgctttacgaggattggttctcgctctcgctcgccgcctgcgcggccttcttcatgctgtacctgctcggcgtcgatatttcccataaccggcgcatctaccgccacaacatcgtccattcgattttgaaatttgttttggccaacaagcacggcaagcatttcgagcagatcgagtaccgcaaatacctcgcgaccgccggcatcatcgtcggcctcggcatcgccgccgtaacggtgacgctgttctcgtgggggcgctatccctttgaaacatggctgccggccttttacacggcgctcgccatcgcggggctcggcacactgctctggtttgccgctgcgctgcgcgacgacctcaaggactacggcatcctgatggaccagatcgagaagatgtacggcggcgacctgaacgccgtaaacgcgctgcccgccacctcgccgctctacagctccgcgatgcagctcaacatgatccgcgacggcatcaagatcgccgtggaggagggcatcaagtccgagcgcacgaaggtggagctgatcacgaacgtgtcgcatgacatcaagacgccgctgacctcgatcatcagctatgtggagcttttgaaggccgagccggatctcccgccgcacgtcaaggattacatcgaggtgatcgcccagaaatccgggcggctgcgctacatgattcaggatattttcgatgtatccaaggccgcgaccggcaatatcacgctgcagcccgagtatctcagcctcgacaagctcctgcgccagacactcgcggatatggatgcgctgatggaagaaagcccgctgcagtggcgcgtgcagatccccgaggaaccgttccctgtccacgtggacgggcagaaaatgtaccgcgtgttccagaacctgatcaaaaacgcggcgcagtacgcgctcgacggctctcacgtttacgtcacgctcactaagcgcgacggcagcgcctgcgtcacgatgcagaatatctcgaagcacgagctgacgatggacggcgaatcgctgaccgcccgctttgtgcgcggcgacgacagccgctctacctccggcagcggcctcgggctctcgattgcgaagagcttcaccgaggcatgcggcggcacctgcgcggtctccgtgcagggcgacctgttcaccgcggtcatcacgctgccgctcatctcgccgccggagcccgccgcgccgcgctctgcggaaatcccggaggatgcgccggaagccgcgcccgatgcggacggaaccgctgccggtacagaccctgaaaagaacgcctgacctcttggtccgcgtttttccggccggcggccgatgcccatgcagcagtggaatcggccgccggccccattctgtattgcacagccgcggcctttgggccgcagggcaagatcggaggcccgcatgagaatcacccgaagccttgaatttcagatcggcagcaacgaggaaaagctgccctacgccacggctgcgtttccctatatcgcctcgcgcgcagagctggacgattaccgggagccgttcgtgccgtggcactggcacaacgccgtagagcttttttacatggaaagcggcgtgctgcagtaccacacgccgcacgaaacgatcatgtttcccgcgggcacggccgggtttgtcaactccaacgtgctgcacaggacggaaatccggacgcaaagcgagcgaaacgtccagctgctgcacatcttcgaccccagacttcttgcggggagccacgacagcgccatcgagcagaaatacatcatgccggtcgtcgcctccccgcagatagagctgcttgccctgcggccggaggtgccggagcaggccgccgtcatcgaccggatccgcagcgcgttccagctctcggaagacgcacttggctacgagttccagatccgggacgcgctctcgcagatctggctgcagctgttcgggccgcagctccccgcgcttcgggaaaaggcgcagtccgccgaccgctcggccgacaaagtaaagcgcatgatgatttacatccacgagcactacgccgaaaaaataacggtttcggcgctcgctgaaaccgcctttctgagcgagcgggaatgctacagggcgtttcagaaccacttgcacatgacccccgtcgcgtatatcaagagctgccgcatacaagcggcgcggcagatgcttgccgacagccagacgccgatcaccgaaatcggctacgcctgcggccttggaaacgccagctacttcgggaaaatcttccgcgagcaaacgggctgcacgccgctgcagtaccggcgcaaatggcaggatcgtgacaaaaaatgacagcattgcgatatactatccgcagcaccggcgttataatggatacagaagtccgcgccgggctgcggttttttcctctcgcagccccggcgacacaagcgattggaaaggaagaaagccgtggaactgaattgcaaaacggcggaagcggcgctccggcaggccgaagcgcagaaccccggccgctgggcggcgcacgtgcgctttgcggcgctcgcctgccggaacatcgccgcgcgctgcgacggcctgtctgccgatacggcctactgctacggcctgctgcacgacatcgggcggtatgccggcgtatcctctgaaaagcacctgatcgacggctaccgcttctgcatggtgcggggctgggaaaaagccgcgcagatctgcatctcccacgcctttatgctgcaggacatccgcacgtccatcggcacgttcgacgtatcggacgacgactaccggtttatggcacgttttgtccgggacgccgtttacgacgattacgaccggctcgtgcagctgtgcgacgcgctggcactcccgaccggcttctgccttctggaaaagcgcttcgtcgacgtcgccctccggtacggaacgccgccccccaccctcgcgcgctggaagaagattctggaaatcaaagcgctttttgaggcgaagataagcggctccatctacgagctgctccccggcgtcgtcgaaaacacgtttcgataaaccacagattgatggagatctaccatggcaaactactacgttgcaagctgcctgttcacagcgcggttccccgagacaagcctcaggatacagaactatatccggacaaagccggacatcaaaacggtgcgctgctgcattccgaatttcaaagtggatttcaacaccaaccggattccctccccaagcgtccggcaggcctgggaacagctgccggtgtccgaggttttccagccagacgacactgtgatctcggtctgccacaactgcaccaatatcgccgaggagtggcgcgccggcacaaaggccgtatccctgtgggagattatcgaccgggacccctccttcgtctttcccgactatgacggcatggaggtcaccgtgcaggactgctggcggaccagagagcgccggaacgaacaggacgccgtccgcagcctgctggagaagatgaacatccgctttgtggaagcccggcagaaccatgcggagacagagttctgcggcagcacgctgtaccgggaacagcccgtcaagaacgcgcggctcgcgccgaagcactacgtggagcaggcgcagggcaagttcctcccgcatacgccggaggaacaggcggtcatcatgcaggattactgccgccagttcaaaaccgatgcggtcgtctgctactgccactactgtctggaagggctgcagcagggcggtgtgaacggcctgcatatcgcgaacctgctcttccctgacagtaacgccgcggcaaatcagtaacctgtttaaggcaaaagcgctgctttttagctctgcttttcagctccgcacttcattcccgcttaaaacacaacaaaagacgccccggtgttttcaatgcagccggggcgtctttcggcgaaacgcgcccatgtggaaaattccatgtgggcgcgctgctcttatactattattataaccgcgtcggcagaatcaaaacggccgatattgtgaccgcacagtatataaagtacgcgataaccattgtgcttacattagcgttctgccaatacaggatgaaataagcaatcagggcagcgacggcaaacacggcgcacaaactccccgcaatcgtatttacacggtcccacttctctttgctttccatggcctttttgttgtggtatcccacgcgaaagtcgggaaattgcgtgtgcttcctctttaaaacaacggctaaaatccccaaaacaagcgcataaaccgcataaaacaaaaacatcagaaaatgtgccatgtgttcttcactcccccaccgcttcgtttgccggtctgttcagttttatgttaccacatcgcaggacaaaacacaagaacagccgcagtgcacgaccctgcggctgttcttgcatttacgcgccgcgctttgccgtaaggctgtgcgggcagcggcttgtttactgtccctttgcggacaaggggctgtcggacagcgcccagccctccaccacgcggacgccgaccggggccgggttttccctgaacgtcacaaattccattgtattctgcaggatctcctcgcccgtatgcaggtttttgatcttcaccgtataccggatcgcgcaccagttgtcgcggataatcatattgtcgaactggcccagctccatcgtgtagtgctggaaaagctgccccatcatcgccttgtactccgccagcgtcaggcgcttgccgtagacgttgtagtgcgcgtccggctcatacagcgtgttgcaccactcgagccaaccgtcatagccgccgttccagttgttgaagccgtcgaacagccgccgctcgatggccttttcgatctccttttcaatcggtgtcgggttcttgatttccgttacagccattttaaattcctccagtataaatgtatatttcaaagatccctttcggtctttgctgtatacagtctaccggcccggtgttttcaaaatgctttcgaatcgttatcggaatattaaaaacaaaaaatccaagaaacaaaaaccccggcagcctttcggccgtccggggttcgattcattttactgtgcggcttactgcacggccttttccagcgcctgctgtacatcggcgaggatgtccccgatattctcgatgccgacggagaggcggatcaggtcggcgccgacgccggcctcctcgagctggcggtcggagagctggcggtgcgttgtgctggcggggtgcagcacgcaggtgcgcagatccgccacatgcgtgacaaccgaggcgagctccagactgtccatgaatttcgtcgccgcctcgcggccgcccttgatgccgaaggaaacgacgccgcaggtgccgttcggcatatacttcttcgcgagcgcataatacgggctgctctcaaggccggggtagttgacccacgcgacgcgctcgtccgcctcgaggaatttcgcaatcgccagcgcgtttgaacagtggcgctccatgcgcagggcaagcgtttccatgccgagattcagaaggaacgcgttcatcggtgcagcctgcgcgccgagatcgcgcatcaggtggcatctggcctttgcgatataagcggccttgccgaactgctccgtgtagacgacgccgtggtacgattcgtccggctcggtcagctccgagaatttcccgttattccagtcgaaattgccgctgtccacgatggcgccgccgacctgcacggcatggccgtccagatacttcgtcgtggaatggacgacgatatcgacgccgaactcaaacggccggcagttgaccggtgtcgggaacgtgttgtccacgatgatcggcacaccgtgctcgtgggcaacgtccgcgaacagcgcaagatccgtcacgacgagcgaggggttcgcaagcgtctccgcaaacacgcagcgggtgttctcgcggaaggccgcgcgcagctcgtccgccgtggaggtcggggaaacaaaggtgaaatcgatccccatctccttcatcgtcttgtaaaacaggttgaacgtgccgccgtagatcgcactcgaacagaccacatggccgccggcgcggcagatgttcaaaatcgatatcatcgaggccgcctgcccggaagcggtgagcatcgcgcccacgccgccttcaagcgccgcgagcttcttttccaccgcgtcgagcgtcgggttgcccagccgcgtatagaaaaagccgtccgccttgaggtcgaacaggtcgcccatctccttggagctctcgtaggtatacgtcgtgctctgcacaatcggcaggacgcgcggctcgccgttgcccggcgtgtagcccgcgtggatgcaagttgtatcgggtttatacttcttcacttttatatcctccattccatgcctgcgcatgtggttttacggcataacgaggtttttcagaaacgccgcgatctgatccgtcgccaaaacggcgagcatcacgagcgccagaaacgcgatgatcgaaaccgtctggatcaccatgcgctttcccttcggcatttcgtcctcctcgggcggcgccggctcctcctcgcgctcctcggccatcgcctgattcgcgcgctcgaggtcctgatactccacatagacgttgcggtcggtcggcaaaaactccgggtcgtaaatactagtggaaaagccggccttcaccggctccgtgcggtgccggatcgcccgcgcttcgaaaagcgcggaaagctccgccgcctctccctcgtgcaccttcataaaaaagacctcgtccccctccctgacaggccgcagcgcgcggctgcgccggcagttcgggcacgcccgggtggaatcctcgcagatcgtctggcattttgtgcagtagagcatggccgcctccctatcacggctaaagccggtttaggcttagtatagcacagcggccccgtaaattcaacaaaaaatctcagcgcagcacgggctgaagctgctccccgcgaaatgcggcctcgagcgtttcgggcagaagctcaaaatgcgcgacgagcgaattcggcttcttctcggggtcgtcctgtccgagaggcgtaaaaaagatgtgctttgtgttcaaaagcgcgccgatattccggcacgaagcgccgagcgcgtcgttcgacgccagcgcgaggacgaccggcatcttgatgcgcaggccggatttgaccgccatcgtgacgcttgtatccgtcacggcgttcgcgatcttcgccgcagtgttcccggtgcacggcatgacgaccatcgcgtccgcaaggtgcttcggaccgatcggctccgcgccggcgattgtgtggatgatctcccgcccgcagagttcctcgatgcggcggcgaaagctctccgccgtgccgaagcgggtgtccgtgctgtaggccgtctcgctcataatcggcaggatttcatacgtctctctcaagcgcgcaagctctttcagcgcgctctcaaatgtgcagaaggaaccgcacatggcaaatgcaatggtacgcataacgcgatcactactcctcaagcatattgtaaacggcttccttgatgtattccgccgctgttttcggcgcgacgcggccgggcagcgaaagcgcctcgacgacgcggatgtgcatccgcagcgcgctttccgtatcgatgccgccgggcgcggaggccagctccagaatgagcgtatcctcgtcctgccgtgcgagcaccggcgcgccgatcacgcgcgcgggcaccgtgttgaaaatgatgtcgaaccgctgcgtgatctcgcggtacgtgagcggctctgcgccgagcgcgcgcgcaaacatcagatcgccctttttccgcgccgccacatagacgtgcgcgcccatcgcgtgcagcaggagcgccagatttttcccgatgcgcccgaggcccgtgacgaggcatttcgcgccgttcagcgtgccggggtactcgcggatcgcggcttccaccgcgccctccgccgtcgcgatcgcgttgccgaccgcgagctcctcacgccggtagtaatcctccggctcgatctccttccacaccgcggaggaggccgtgagtttctggagcatgccgccgtacaccgtgcggttgcggaacaaagcggcaaactcgtcgtccagccggatcggctcggccgcaaacggcgcgagcagcgtctcgccgtcgcgcgtcgcgggcagcggcagcaaaatcacagagcttttctttacaaggtccaaaagcggcgtttcggcaacgccgcggatcggccccgaattttcaaaaccgtatgcacagacggggtaaccgtccgcagcgatcgaagaagcgagataacgcatccgctcatcgccgccgattacgccgaagctgttgatcatgggcataggggttcacgcctttcaaaaacatttccttcaattcattgtatggccttcggccgcttttgtgccgcgcaggaatactttttctgcctttttttcattttgctatttattttttcgcggtttggcattataatagtacagatcataagattctgaacccgtgtattcttcaatttatttttcagatataacggcccgcggcgcatgtccgcggccgacgaaaggaacgtcttgactatggcagagagcaaaaaccttctcgatacgataaaaaagctgcattttgtgggcatcggcggctcgggcatgtgtccgatggcggagattctgcaccacaagggctacaccatcaccggcagcgacatcaatgaatccgacacgctcgagcgcatccgcggctacggcatcccggttcacatgggacaccgcgcggaaaatatcggtgacgcggagctggtcgtctacaccgcggccgcaaagcaggataatcccgagctcgccgccgcacgcgaaaagggcgtgcccacgctcgagcgctccgtggtgctcggcctgctcacgcagaaatttccgaattctatcgcggtttccggcacgcacggaaaaacctccacgaccggcatgatcacgcagatcctcatcgaagcaggccgcgacccgagcgccgtaatcggcggcaagctgcccttcatcggcggcaacggccgcgtcggcaaaagcgacatcgtggtctgcgaggcgtgcgagtacgtcgataccttcctccagctccaccccgcgttcagcgtcatcctgaatatcgacgccgaccacctcgattacttcggcacgctcgacaacatcatcaaatccttccacaagttctgcatgcagacctccggccgcatccttgtgaacggcgatgatccgaatgcgatgcgcgccgtcgagggcgtcacgcacgcggagatcatcactttcgggcgcaccgaggcgagcgattactacgtcacagagctcaatgaggaggacaccgcctgcgaggacttcaccgtcatgcacaaaggcgagcgcgtctgccgcgtcaacctgcacgtgccgggcgagcacaatatgatgaatgcgcttgccgcggccgcagctgcccacacgctcggcgtggacggcgcgcacatcaaggcggcgctcgaagccttcaccggcgtgcaccgccgcttcgaggtgctcggcaagttcggcggcgtgaccgttgcagacgatttcgctcaccacccgacggagctttcctccgtgctttcctccgccgtgcgcatgggctaccacgcggtgtgggcggtctttcagccgcacacctactcgcggaccgccatgctgctcgacgattttgccgcggcgctctcgattcccgaccatgtcgtgatgaccgagattctcgcggtgcgtgaaacgaacacttacaacatccacacgagcgacctcgcggccaagattcccggaagctgctggttcgacagcttcgagaagattgccgactacgtgatggcgcacgccgaggaaaacgacctgatcctgacgctcggcggcggcgacatctacaaatgcgccaacctgatcgtggaaaaatacaagaacagatgaaaaacggggaaagccgtcaaaaggctctccccttctttctgccggcgggacaggccgccgcgcaccacgctttcccggagaggtaatcgtgtgaaaaatactttttcacacacgatttgtgcctttgccgcgacgagcaaagcggcaaaggcacaaaaaataaggaatggtgatttccatgtctatccgcgcagtctttttcgatgtggacggcacactgctcggcgccggccgccgcatcccaccctcggcgctcgaggccctgcacgacgcccgccgaaacggcatcctgctcttcgtcgcgaccggccgcgtcactgcgatggcgctccttttaaaggaaatgttcgatttcgacggctacctcgcaatgaccggccagtacggcttcgaccgtgacgggcgcgttctgcaccgcatgccgcacgacccggaggatatccgcatcctgatgcgcctgcaggaaaaggatccgtttccctgcatgatcgccgaggcggaaaagtgctttatggcgagcggttccgacctcgtgcgccggcattttcgggatcacgggctgccggccccgccgctctacgaccttcgccggatcgaaacgcacgacgtttaccagctcatcacctacgaccccgcgcgcacgaacccgaagctcgcgccgctgcgccatatccgcatcacaaacgccgccgattactgccacgacgtgatcccggaaaacggcggaaagcacgtcggcattcaaagtctcgccgcgcattacggcttaaagcccgaggagatcctcgttttcggcgacggcaaaaacgacgtcgagatgctgcggtacgccggcatcggcgtcgcgatgggcaacgcctgccccgaggcgaaggccgccgccaagtacataaccgcgcacgtcgatgcgggcggcgtgcgccatgcgctccggcattttcacgtgatctgacgcgacagccccgcgccggcgaacgcgctgctgctttggcctttggaccggcaccgccgcaaggcatacgcccgcgtacccaaacacctgcacttttcccgccgcattttccgcagcggcgccgcggacttttgcaccgccccgccgcaaagcgggttccgcatccgcctgacaggcatttctgcaaacctgcacgcgccgcttacccgcagcattttaccggcgatgccgccggcttccgcacaaaaggagatcgccgagagccatacggcccccggcgatctctttcattttaaggagaaagcattccgcgaaacgccttattttttctatataggacgccggcgcttctgcgctgcggcattccgaaggctatcactgattcagcttatatacatcgtactccggatcatacgcggagaagccctgaatctcgacgttctcgtcgtgcttctgctggtatgccgccgtgatttcatcgacgctgttgtccttcacgaactgcaggagctcgctgaccagcttatcgaattcctcatcggtttccgccatgatgatcttcggatactgcgccttcgactggtcgagaatgatctggcggctgacgccgaggtcagactgcgggtcgatgacgtccgtcaggccggtgttttcgtccgtgataaacttctggccgatgcgtggattctcttcgtcataggtgcacagcttcgcctgaatatcaacggtccagttcttcgtctccggagattccttttcgttgacagcgtacttcgtcaagtcgacgttatcggagtgtgccggctgcgaccagaaccatgcgcctgccgaatccagctctgcggaggtgaattccgactgcggcttaatcaggttcgggtttccatcctcgtcgaggccctcccaaaggccgccctccgggccgtacatcatattgatggagccttccttcgtgagcatccaagtgaacaggtcaaagatgcgctggggattttccgccttcttcgtgatgcagttgacgttccagcctaccgtgccggcctcgtcgccgtaggtgatctccacgccctcagcggcggggaacatcatgctttccggctgcatggcctctgtgcccagaacctcgtaggaggtttcgttgcccgtcttttcgcgcacgatgcggcggaaattgttggtgtcgtcctgcgagaagtcgtaccagagcagcgcggggcgcgcgttggtgaccttctcaaggaactggtcggcgctgtccgtaaagacctcggccgtgaagaggccttccttataccactggttggccatgcgcagcgcctcgatcacggtctcgttctcaaggccgtactgcagggtgccgttgtcctgtgtccagtaggtatcgagcggcagcgcgccgcccagtgcgcggtagaacggccaccagcagtaatacgcgttatccgtattcgtacaccagaagggcagcacgctctggccggagtaggaggtcaggttcgcttccttgacggcgagcgcatactggtggaggtcctcaaaggtttcgagcttcggggaaccgaccgcctcgtaggtcgccgtgttgatgatccactggtagttgccgccggtcgcgctctttctcgcccagttcgggatgccgtagagcacgccgtcaatcttcagcaggtcgcgcgtcgcttcggggatatcctcctcaaacgagttgccctcgtacatatactgcgagagatcctgcagatagccgccgcgggcgatcttattcagatccgggccgcggtccatgacgatgacctccggcagatcgtccgacgagaccatcaggttcagcttcgccatcgggtcggagtccggcgcggtccagttgacctcgacgttaaacttgtcggacatgtactgtgacgcagcatcctgtccccagatcttggaccagcccgtgtaattgtaatacaccgtgaacgaatacttttcggaggtatcgtccggccctgcagccgtttccccgccggattccccggaagcgctgttcccgccgtctccggtcgtagagctttcgccgcctccgccgcagcctgcgaacaggccgagcaccagagccgccgcaacaagcagggcaagaatctgttttttcttcatttccttcatcctttcttcgtgtgaaatttatgtttcagggatattcccctaaaagcccgccgcatccgtcagcccttgatcgagccgatcatgatgcccttgataaagtaccgctgcaaaaacggatagatcgccacgatcggaacgatactcgtgatcatggtcgccatcgtgatggagcggacgttgaccgccttgcccgcggtcgcctgaccgatcacggcggcgtccgtgcccatagccgccatgcgctctgcaaagctcgcctcattgatgatcgagagcagcaccgaggtcatcggcttcaggttcgggtccgtcacatagacgtatgtcgtataccaatcgttccactgatacacgccgaagtacagcgcgatcgtcgcgatgatcggcgtggaaaccggccagaagatcttaaagaagatcgtgaaatagttggcgccgtcgatgcgcgccgattcctccagcgcctcgggaaccgattggaaatagcttcgcatcaggatcatattccagatattgacaaggctcgggatgatgtagacccagaaggtgttcgtgagccccagcgtcttaatcaggaagtaggtggggatcaggccgccgccgaaatacatcgggatcaggcacagcatggtgtagccgcgccggcccacgaggttctttctcgagagcgcgaaggccatcgcgcccgtgaccagcaggccgccgaccgtgccgacgatcgttctggcaaacgtgatgccgtaggcgcgccagatcgtttccttgccgaaaatattcttgtagttgtcgattgtaaacttacgcggataaatggtgatgccacccagaatggtatcgtcggcatagttcagtgaaattgccagcgcattcaggaaaggatacagcgttgtgacaaacaccacggtcatgatcacgaccatcgcaatcacgatcacgtagtcgctcgccgtcattttggctttcattttatggctctttttcatttgagttcgcaccgcacgtaaacctcctttccgtcagaacagcgcattttcaccggccttgccggcaatccagttggcgccgagcagcaggccgaagttgatgactgctttaaacaaacccgccgccgtagcgaaggagaaccgccccatgttcatgcccatgcggtagacaaaggtatcgatgacgtccgcatattcggtcagcatggcgtttcccatgttcttcgtgagcatcatgatctggtcgaagttggcgttcagcacgccgcccacgttcatgatgaaaagaagaatgatggtgggcttgatcgccttgagcgtgatgtgccacatcttctgcgcacgtgtggcgccgtcgatatctgcggcctcgtacatttccgcatccacaccggccatcgccgatatgtagatgatggagttccagcccacttccttccagatatccgtgaacaaggtaatgccccaaaagtattttccgtcttggaagaaaccgatcggctcgtcaataatattcgcccactggagaaattcattgaccgcgccgccgtcgatcgacaggaagtcgaacatcaaaagcgcacataccgtccacgaaatgaagtgcggcagatagctgacggtctgcaccacttttttaatgccggagcggcgcatttcattgagaaacactgcaaaaacgatcgggcagataaagccgatggacagcttcaaaaagctgatgaccagcgtgttgcgcagcgttctgaaaaagttcgggtccgtaaacagagattcaaactgcttgaagccgacccattcgctcatcccggggaaatcgcccatgcgaaactcctgaaacgacatgatcaggccgtacatgggcaggtagctgaaaacgatcagcaggatgatgcccggcagaaccagaagctgaaggtcccattgctcgatggcccgggcgaaaaagccctttttctttgttgtccgctgaaccgcagcgcctcctgtttctttcacatctcatcactccctctttataccaaatatttgagtatgctgtaagcccttgacccggcggcgcccgccgccgataagctggatggctctctcctcccttccgcagatttggttattttttcggctttcccggccttaacggccggaaagttaatcccaacagaagccgattataccggatatttatatccggtataaaagagctgcgcagctcttttatcgcattattcacaattcattaacacaatcatataccatacagccggcaaagtcaactaaaattttctttattattaaacttttttatccaatggcgttttttgtctctcattgacgacattcggaaccgctgaatttcaggcattttgcctgaaatcgtacagcgcacatgaaatccctgccaaccgcacgaatacgtccgaaaatgcggcttattgtgcgcggtcccctcgcccggctgcaaaaaaagagcggcggcaggcgccggcctgtcacggcctgcatccctgctgtcgctctttcgcttcctattttccgcgctgcccgccggcgcgtctgttttccgtacgtccggcggttcagcgccgtgcagcgcaccgcatcatttttccgccttctgcgccgccttaaaggcgcgtcccgcggcgttctgctcgcgcattgtacggagaaacgcctcgcgcgacacgcaggcgggcttgtgcgcccactccgtcgtctgcacgaatttatccgccatccgctcgaattcctcctcgccgacctcgatgtcgtcgaagcagaccggcaggccgaccgaggcgttgaaccgcatgatgcgcgctgtctcctccgcctcccccgcatagcgcagcaggcacagcacgccgagcgatacgatctccccgtgcaggtggctgtggccgtgcttcgtcaccgtcgcgccgtaatagacgcagtgcgccagcgaggaattgtagtaatacccgtccaccgttgtcatcatattcgagacgatgcccgtggacacgatgatgtcgagcgtgacctgctcgagcgcaaaggtggccttttttgcgcggatcgcttccagtgccgccgcaccgtactcgacgagcgggtccgtgcagacgcggctgacctgcctgcccatcagcggcgtgtgggaaagggcgtcgtcctgcgaggcaaagaccgcctcgcactccttgctcagcgcatcgccgatgccggcccacaggagcggctccggcgaatccgcgatcaccgcggagttgatgaagcagtggttcgcgagcttcgggtaatagtattcgcggaacgtgccgtccgcattgtagatcacggagatcgccgtgaccggcgcgcagttcgaggcgacggtcggaaatgtaaacagcggcttatccagcttgtccgccacgtatttgaccgtatcgcaggcgcgcccgccgccgacggcaaagagcatatccgccgcctgcaccgtagggtcggcgatcaggcggccgccgttctcataggtcgaatcgccgccgtatggaataaagccgatcagctttacgccggagcccgcaacgccttcgagcagaaagggctttgcctttcccatcgccgtttcgccgccgatgacaactgccgtccgcccgaaaaagcgggtgacctgcgggatctccttataacaatccgcgccgatggaatagctcggcagatacacgctgtagttcgattggtattcattcatataaattcacctgttccctatcttaaacaccacactgttttcctatggccgcccgctcaggcgcggaccgcgttgaacgcctccagctccatgacggcgtctacaatcatttcctttgttaccgtgtaggggtaaacgcgcacgtcgatgccctgcagcgccttctccgcaacggcctcgaggtcagccggcttcgcatgaatatcggcaaggcgcgtcggaagccccatcgcacggttaaaggcaaataccttgtcacgctcctcgagctgcccgtccgccgtgagcagaacgaggatgccgtaagcgacgacctcaccgtgcaggtggtggttctcctccgtgctcttcaaaatcgtaaagccgttgtagaccgcgtgcgcgagacccgttgtgtaatcgacctgcacgaaattcgagacgaggcccgtggagacaatgatgccgagaataacctcggtcagctcgtaggtaaccgcgtgggcgcggcagtcgcgcagcgccttctcgccccagcggagcatcggcgcggcgcacatggtgctcagcgcgatgcccatcgcatcggaatgggcgggcgtgtcattgcgggaggaaaccgtgcactcatagtgcttcgccatcgtatcgccgatgccggcccagaggtatttatccggcgcatccgcaatgatctgcgtgtcaataaagatgtgattcggcgggatcttcgagaaagaatactcgcgcaggctgccgtccggacggtagaggatgccgaggctcgtgcaggcggcgcaggtggaggcgatcgtcgggaatgtgaagaacgggcggtccgtgctgtgggcaagcaccttgcaggtgtcgatcgcctttccgccgccgacggcgaaaatcatatccgcttccgcaacctgcggcgcgagcatttctatattctccacagaagcctcgccgccataccagaacggcccgatgatttcgaggccggctgcctgcgccgccgcgatgagcttctcctgcgccgccgcgagcgcgcgccggccgccgatgacggccgctttctttccgtaggccgggcagatgctccggatgtcctcgtatgcgtctgtgccgaccgaatagccgggaaaaagtgttttctgcattttaaaagccttctttctgttatttgcccttgcacgcggggtgcgccttgatgtattttctgtttttataaacgccggccgtgaggaacgggacgacgacgatggcgatggcgaggtagccgcagtagccgtaaccgtacttgatgatgttcgagaggccgacgagagagatcgtcatcgaaagaacaatgatgaacgcggatacaatcgcgctgcgcgccggcgccgagcggatgcggcggaacagcgagaggttctcaaagcgtgcgacgaagccgaaggtcgtcgtgacgccggtggagatcaggcacagcagcaggcagacgccgtacacggccgtcagccacggcatgcccatctcgtcgcagaccgtcagtgtcggcagcgtgttgccgccctcgacgcccgtgtagacgctctgccaggaaagcagcataaaaacggagagaaccaacgcgacggtgttcatcacaaaggagatccacatcgatttcgagcagctcttcttgtccttcagcggcgtgccgcaggcgatcatcgtcggcagcgtcacgcactggaatccggcgtaggtgaagctgttcaaaatggcctgcggcacattgccgaagccggtcttttgaaaatcggcggcgagcacatcgaaaaggtttccgcttttcacggtgccgacggcgtaaatcgtgatcgccgtgatgaggattgcaatgcccatgtaggtgcttgccatgcgcaccagcgacgcgccgaagatggtcagcgccaaaacgagcagaccgaccaccgcgatgccggcgtaataattcaggccgaaatactggttcagcgcagaggccgctccggaaattgcagctgcaaccgccatcaggaccatgatgtaaaagaaaatctcgaagagaatgtacagcttatccagcgggtgatacagcgtcttgaaaagttccttatagcttgtcaggccccgcgtgttgtacatcagcatcgcttcgcgcatggtcatgcacagaagcagcatggcgatcaccgcgctgaccggacccatccagccgaggccgacgtaataggtgttcgcctgattgccggtagcgaacccgccgcccgcatgcgcggaaaacagcacggcgcccactgaaaacgcgagcataaaggggacctttgcggatactttttctttcatttgttccattcctttcctaaagggggagatttcacccggacaaaacaaaaagccctttcgcctccgctttccgaatcatccggcaagcaagagacgaaagggcaggccttccgcggtaccactcttattcattcacattgttgaatgcactcatcaggatactgacatatccccgcactgtaacgggcacgcccgtccgcgtctaattttaattcgacacggccgctcggtggtgagttcaacgcttccgccagcttgatgcctcgcagcaaccggcacttctctgaaagggctttcacgtttactaatccacgtctctgcgtttcgtccgttattttagcgcaatcgtcggtgaatgtcaagtacagatataaaaaattttttattgaattttcacaaacagcccttcatcggtctttaacgcatcctttgccttttaagcgcatattttggcataatttaaagcccggcgcacagcgtattgcgcaagcatactgcgcaaaatatcctgtcccatcacgcctccgccgctccatatcgataaaatgccggcatagcatctcgccggcacagaggcgttccgccccgccgcaccggttcaagtatggcgcaccttcgtttgcggccgggcgaggcggctgggccgcgccgtccggcggggcgcaaatccgctcgctgcaaaaaaagaaagcctctttcgaggccttcgcattttatcggttttccgccatgacgccgacgagcctgtgcggcacgtacggctcctccagatacgcgagctcctccgcacgcaggctgagggaaaccgagcgcaccgcgccgtcgatgtggctgcgctttgtcgcgccgaccaccggcgacgcaacctttgtgagcagccatgcgagcgcaatttctgtcattgacacgccgcgcttttcggcaagctctgcgacgcgcccgatgatcacgccgtcctgctccgccgtggcgtcgtacttgaagcgcgcatagctgtccgtctccaagcgcttggaggtttcgccggggcgcttcgacaggcgtccgcccgccagcgcgctgtagggcgtcatcgcgatattttcctcccggcacagccgcgccatttcccgctcctcttcgcggaagatcaggttgtaatgcccctgcaccgagacgaatttcgggaagccctcccgctctgcgatggcgttcgcctgcgcaagctggtaggcatagcagtttgaaatgccgacagcacgcaccttgcccgcctttaccgcatggctgagcccctccaaaatctcttcgatcggcgtggcataatcccacatatggcagatgtagaggtctacataatccatgccgaggttctgaaggctctggtcgagcatgcgctgcacatgctgctgcccggtcacgcccgcctcgatttcggccgcgctgcgccgcgggaatttcgtcgcgacgacgatctcctcccgccgcgcaaaatcgcgcagcgcccggccgacaaactgctcgctcgtgccgttctggtagacgatcgccgtgtcaaaaaaattgatcccgttttccagcgcatagcggaggatctcccgcgtctgcgcctcgtcgagcgtccagccgtgctggccggactgcgcgtctccgaagcccatgcagccgaggcacacgcgcgaaacgcgcagcgccgagccgccaagctgtgtgtattccatttccagcgccccttccgttctattctgcattcagtatagcagaaagggcgccgctgtgcaaatacctgtattcgatcgagaatcatgccccaaaggcatttttacagatccttatagcgcacccagcagtcgcgcacgatggcgttcatcgcgtccatcttgcgctgcatatccttggcgagcgctacctgacagcgcgtgcggatcaaattgtgtttcgggtccttgatcttgaaatacttgtcgcccacgatgtaatcgtccaaaaagcgtgtggccagctcgcacgccagcgtgaagcagctcccgcccagcgtttccacctcggcctccgtcagcgtcgccgccgttttatgcaggaagccttccgcaaatgcccagaaaatattcaggttcacgcctgccttatccgcctcggggctatcttcctccacgaaattcgccgcaaagcggatcgcatcgccgaaatcgtggccgacaaggccgggcatcacggtatcgaggtcgatcacgaccagcggcagatgcgtctcctcgtcgaacagcacgttgttgatcttcgtgtcgttgtgcgtcacgcgcagcggcagcacgccctgctcctgtaaatccgtcagtctacacgcctcgtcctcaacggacagcagccagtccagcagatcctgcacctcggccacacggccgcagggatccattgccgcatcggccttcagcttctcatagcgcttgcgcgtgttgtggaagtccgggatggtgtaaaacagctcgcccgcatcaaaatcggacagcatcatctgaaaatcgccgaacgcctgacccgtgctgcgcacaatgtccagatcgtcgcagctgttgaacgtgacggacggcacatagttgctcagccgccagaagccgtcctgatccatcaggtagttgctccgctgtgccgtgtggtgaaaatgcaggcacttcgtatcggggaattttttgtggatgtactcggtcaccttgtcaatattggacatcagcgccaccgggttctgaaacgcgtacgtattcacgcgctgcaccagatacgacttgatctgcgccatgccggagccgtcgtcgcggatataattcaccttataggtgtggttgacattgcccaccttgatctcctcgtaggagaaaaaaggccccggaatgcaaaatgcctctccaacttccaagagctttcgcgccgtgcccggattcatcgcttcttgctgtgttgtcattgaaatcattccctttcacaacgatttgatctctactccctaaatcgatttttatacatagcttatgttctctagcacacagtaaacctaagtcaatttcgcagtatactgcactttatttttcttatcgtaaaactataccatatccatgtccatttatcaagccatttcatttctttcccgctgtgttggctatgcgtgaagaaagtgtatgtatcacggccgtcatcctccatgcgcagtgcaatgggctccgtccacgacaagccggccttggcctgaagccgcaggcggaattccgacatcgccgcttcatactgcgcggcgatttccggccgctccggccggggaccgcagatcgtcatatcaccttttaggatgttcaaaaagccgcggcagctcgtcgctgatccgcaccttgcggatcagccgtccgacaggcatgacccggtcgtccttgtcaccgctcaagcggcgggcgacgccttccatgccgacgccaccgggcggccgctaagccaagcggcgaaggcgcgcatgtgccgcagataaatctcgatggttcccgcacagcgctgctcctcgcgcggcatttgagaaaaccggctgagctgctccgccgccatcctatattcatccatccgaaaatctcccgtaatgaaagtgaagtaaaatacccttagtacgccgccggctgcccggcgtatgcaaaaagcgcggcccctccgtttgaaggccgcaccttttgcattttcctgcggcacacaatcgaatcataccgcaaatccggaaaaattttctattttggtgaaaaatcagaggtctgctttccgtccgtttcaagccgggaagccggcaccgaagccaaataaaaaaacgccgcaggcagcccgcagcgcctttccttttatgatgcgtgttccctccggccgaaagccgcgcagatcacggcttgtccgccgtgtggaaagcgcggatcgtccgccacagaaccgcggcggcgatcaggcaggcgcacacggacgccccgatggaaacgtcatccttcccgattggccctgtgatcatcgcgacgagaatcgccgcggcggccagcaccaccagcgcaatgtatacggccttgtcgatctgccgcagctttttgttgttcataaccatccccgctttcctttgtcctgcgatattatacggcctgaagcgcaccggcgagcgaggcaaaatcctcgagcgtcagcgcctcggcgcgcgcgttcagcggcacgcccgccgcttcgaacgccgctgtaacggcctgcttgtttttgccgagcgtgttcgcgatcgagttaaccgccgtctttcggcgctgcgcgaacgccgccttgacaacgcggaaaaagaatttctcgtccgcaatgtccaccgccggcgcctttcggatgcggagccggatcacggcggaatcgacgttcggcgcgggcatgaagctgccgcggctgacgccaaagaggatttccggctccgcgtagtaccagaccgccgcgctcaccgccccgcaggcgcgctcgcccgggtgcgcgcacaggcgctccgccgcctccttctgcaccatgaccgtgatcgacgtgatcggcaggcgctcctccaaaaggcgcatgatgaccggcgaggtgatgtaatacggcaggttcgcacagacggcgacctgcccgccgccgaactcctcctcgatcatccggcgcaggtcgagcttcatcacgtccgcattcacgattttcacgttgccgcagtccacgagcgtctcgccgagcacggggagcagccgcttgtccagctctaccgaaacgacctttttggcgacctgcgaaagctcccacgtcaaaacgccgatgcccgggccaacctcgaccgcgccggcgcagtctgctgcgccgctcagcgccgccatgcgcgggcagacggatgggttgataagaaaattctgcccgagtgccttggaaaagctgaagccgttcttttccatgaccgcacggatcgtcgaaatatcggaaagtctctgcataattcaatctcccaaataaaattgcggtccctctgcgccgaatctccccgcgcacagcgcggaataccggcccttacgcgctccgcttctgcgcgctaaagctgcggcaccttgtagagccggacgccgttttcgtcgtacacgcatgtaaaaaacgcggcgagcgccgtttcgttcgcactgaaattatccgtctcgtaggcggaaaccatcacataatcgacgctgtacgccttgaaaagcaggaggttgtcgcccggattttggaacatcgcccgcatatcggcctcgcgctgctcgtaatcgaggccgtggaaatagacgtagctcgtcgagccgcagacgatgttgcgcccggtcagcgcggcgatctcgttgttgtggcgcatgtcggtcaaaatcgtgtcatccggttctgtgttctcctgcacgtatgcggcaacggcaagctgaccctttccgtacaggcagtacccggcgaggctttcacgcgcgatcgtcaggatggccgaaaccgtgcagaatacgaggaacgcgccggcgagcacctgccgcccgggcagcccccgcagcctgcggtacagctcgacgagatacgaggccgtcacggcgcagagcaggaaatatgcggcgtagagcagcttgttattgtcgtacgtattcggctggaacacaacgaattcgcagatgaaccagatcacgaccgccggggccgcgaccgaaaagctgtgccgccgcgccgaaaacagcgcgggcaggataaacagcgccgccgcgccaagattgacgaggtagaaccagaggtagccgtccttctggttgccccagttgaaccagccgcgcacgaacgattccgcgctcgcctgcgtgaaggtccacgtcagaagctgcggcacggcgagcagcaggacaaggagcagaaaaacgccccacgtgcgcagcagcgcaccgccgagcccgcggcgaaacgcgagaaaaacgagcgccgcgagcaccaagacaaacagcgcggccgccgcgcagaccaacgcgagaaacacggcggaatcccgcgggagcaccgccgggacgagaaactgcaccagaacgggcagcgcgagcagcacggcggccgcgtatttcgccgcgcgcagcgctttgcgggacgaatcgcaaaaaacggcgcggcagagcgcgaagcacagccacacgccgcagatcagcccgagcgctaaaaacgaatgcgtgtggatcatcaccatcgccccggcaaaaatgcccgcgggcacaaagtacgccgggcagcgctcatacaccgcgcggtacagcacatagagcagcgggaacagcgccgcccagccgaaaagcgtcgcgcgctgcggcagcatcatgtccacgatcacgttgacccagcggatattcttctcgacaaggttcgtcggcgtctcgtaaaacgccgtgaaaatccgcgtgaaattcgcaccgttctcaccgagatccgtcaaaaagtacgcgacgccgaagccgccgttcagaaaaaacagcgccatcgcgagagcggcctttgccctgccgcgcaggaagcggccgagaaacagccacgcgccgaaaaagacctgcgccgccgcgaacagcatcggcaggaaatacgcgagctgcaagggcgcgccgagcagatagaggctcgaggaaatgctgtcggaaaggaacggatacgagagcttcacgccgggcagaatcgaatacatcggcgggaacgtcccctgctccgcgatgctcgtgatgaagccgaggtgcatgctcatgtcgccgtaggtgcactggctcgaccagatctcgccgtcctgaacccggaagctgtgcagcaaaagcccagcaaaaacgaaccagagcagtgcgggcacgagcaacccccattcttttttgacaaaggccgccgcaagcccccgcggcacgcgcagcgcggggcgccgccgccagagcgcgagcgccgtcacaagcagcaggagcgcgagcgccagaagatgcgcccaaaccgaaaagccaagcgcaaacgcccagagcgccggcagccacatcagaagcacgctgccgaccgcactgccgagcaccgcgcggacgtaccgccgctccgttttgaaaaagcacgcggcaagcagcatgccgcatgcctgaaaggccagaaaatacagcagcgccaaaacgccgccgaaaaaatcaccgtgcatcggaacctccggtaaagctgatattcagggctttgagccgccggaaagcacccgccggcgcccaaaaccgcttttgtatattctaccatctgaccgaaagattgtaaagccggtgtttttcgcttattttcacgcggcgcacacatttttctgttgcagaggcagagaaaatccggtataataaatgcaatatgctttgagaatcggggtgtcttcatatgcggactgatgtccaccgaagagataagacgaactactatcttgatctggcggagaccgtcgcccagcgctgcacatgccttcgacgtcactacggcgctgtgattgtgaaaaacgacgaggtgatctccaccggctacgtgggcgcgccccgcggccggaaaaactgcacggacctcggcacctgcgtgcggcaggagctgcacatcccgcgcggcgagcgctacgagctgtgccgcagcgtgcacgccgaagccaacgcgatcatcagcgccccgcgtgacaagatgatcgacgcgacgctttatctggtcggcaaggaggccgacaccggcgcatacattcaaaacgcggtctgctgctccatgtgcaagcgcatggtcatcaacgccggtatccggcaggtggtcgtccgcgacgaccgcgaccaatacagaaagatagatgttcaaaactggattataaacgacgaatccatcgaaggtgtattcggctattgagcctttgcatcgcccgtattcgctgtaaaggctcggaaggaatacggtgatcatcatgtctttgatacaggtttcgaacctgaccttcggctacgagggcagcttcgacaatgtttttgaaaacgcctcctttgccctcgataccgactggcgctgcggcttcatcggccgaaacggcagaggaaaaacgacctttctgaacctcctgcgcggaaaatacgcctacagcgggcacatcacggcctcggtgcagttcgagtatttcccgttcgaggttaaaaacccggacgatacgccgctcgagatcgccgaagcaatcgacccggatttcgagctgtggcggctctcgcgcgaactgaacctgctcgaggtggacgaaggcgcgctgtaccgcccctattcgacgctgagcttcggcgaacgcacgaaggtgctgctcgcgatcctgttcatccgcgaaaacagctttcttctgatcgacgagccgacgaaccacctcgacacggcggcgcgcggcacgctcgcccgctatttgaaaacgaagcgcgggttcatcctcgtcagccatgaccgcgcgtttctcgacgcggtcgtcgaccatgtgatctcgatcaaccgtgcagacatcacggtgatgcgcggcaatttcacgacttggcagcaagagaaggaccgcgaggatcaattcgaattgcagcagagcgagaagctgaaaaaggacgtcaagcggctggaagcggcggcaaagcgcagcgcggagtggtccgaccgaaaggaaaagaccaaaaacggcgcttatgacagcggctttgtcggccacaaggccgcgaaaatgatgaagcgctcgaaatcgatcgaggcgcggcgcagtgaagcgctcagcgaaaagagcgcgcttttgaaaaatatcgaatccgccgatacaaagctcgcggtcgcgacactccgccacccgaaagcactgctcgctgaggcgcgggacctctccgtcgattacggcacggggcccgttttcccgccgctgcgctttgagatccgccggggcgagcgcgtcgccttgcaggggcggaacggctgcgggaaatcgagcattttaaagctgctctgcggcgaggacatcccacatacgggcacgctggaaaccgcaagcggcctcatcgtctcctatattccgcagagcgccgagggcctcagcggcacactcagcgatttctgtaccgcgggcggcgtcgacgaaagccttttcaaggcgatcctgcgcaagctcgagttccagcgcgcgcagtttgaaaagcggatggaggagttctccgaaggccagaagaaaaaagtgctcatcgcaaaaagcctctgcgaaaaggcgcacctgctcgtctgggatgagccgctcaactttatcgacgtaatctcccgcatgcagcttgaagcgctgctgatcagcgccgcgccgacggtcgttttcgtcgagcacgaccgccgctttgtggagaacaccgcgacgaaaattatagagatctgaccgaaagcccaccgcaccgccgcggcgggctttccataaaaaaagggggattttggaagatgcaagagggtcgagaacacatcgccgtgctcgacggcgtgcgcgcttatgcggttttgatcgtcatgggctttcacctgtggcagcagtcctggctgcaaaacctgttcccgagcgatctgctgcgcccgctcggcgtgcagcatttcagcctgacatggctgccgcgcaccgggtatatgttcgtcgatgtgctgcttctgctctccggcttctgcctgttcctgccgtatgcgcggcagatggcggacccgctcgcccccgcgcccgacggccccggcctgtatttcaaaaagcgtgctgcgcgcattctgcccgcctactacctgtgccttctggtgagcctgctgttttttgtgcggcccgcgcagtacgcgagcttcggcggctatttgcaggatcttttcgcacacctgacctgcacgcacaacctgtggccgcagagctacctcggcacaaaattttccggcgcactctggacgctcggcgtggaggtgcagttttacctgctctttcccctgctcgcgcgcatttttcggcgtttccctctgcaaagctgggcagcgctctgccttgccgcggaggcctacatcgcccttttcgcgcatcagccggcgggcggcgccgacccgctgcacatcaaccagcttccggccatgctcggggtctacgcaaacggcatgcttgcggccgtcatctggtgccgcctgcaccgcaggccgggagccagccgccggcagacggcgctggccgcgacgctcgtgtgcgccgcctcctttgccgcgctcgtctgcatgttacaggacggcctcaaccgcgcgccggtcgtccagcgctggcaggtcgatttccggtttctgttctcggcggccgcatgcgtattcatcctgtcgctcggcctttcctgccgcgccgtgcagtggattttttcaaaccgcgccgcccggtttaccgcgctgatctcctacaacctgtacctctggcacatgacggttctgctgcaatgtaaggcgtggcgcctgccgccctatccggacgccccggcgaatgctttcgcgtggccgcagtccgcaaacggcgagccgtggcaccttgcgtggcagatccagtacaccgcgctgttctggaccgcctccttggccgtcgccatactcgcgacataccttgtggaaaaaccggccgcaaagcgcatcctgcggcttcacttcccgcgctttagagaaaaaggcgcggaccgcgcgcccatggcctgatctgcataaagcatacatatcccttaaaagcagagcgaacgagcccggcttttggcatgcgccaaggccgaacccgttcgtttttcatttattccgttcgcatattctccgccccggcgcggcgctcgaagcggttgatcgcacagaggatgcccttgatcgacgagagcgagatgttgtggtcgaggccgacgccgaaaatcgtctcgtcgccgcggctcagctcgatatacgagacggccttggagtccgcgccggtcgaaacggcgtgctcgctgtaggaaacgaaccggtagcccgcgatgccgaccgtgctcagcgcattgaaaaacgcgtcgatcgggccgtttccgcggccggaaagctggcggtcacgcccgttcacggagagcacgccgtcgaaatagacgagcacacggtcgagcttttcgttctcctcaaagagacggtagcgcttcagatcgtagggcgcgtgcacgcgcaggtattcgcgccggaagatctgatagacctcctcggccttcagctcgcgcccctcgcggtcgcagaccgcctgcacggccgcgccgaactccgcgtgcatctgcttcggcagcgtgtagccgaaataccgctgcatcacaaacgccgcgccgcccttgccggactggctgttgatgcggatgatcggctcgtactgccggccgaggtcggcggggtccaccggcagatacggcacctcccagtatttcgagccgttcttcgccatgtacgtgacgcccttgttgatcgcatcctgatgcgacccggagaacgctgtgaaaacgagctcgccggcatacgggtgccgctcgtgcacgcgcatgtgcgtgcattcctcgtacacgcgccggatatggcgcatattcgtaaaatcgagcgccgggtctacgccctgcgcgtagaggttcatggcaaggttcatcaggtcgcagttgccggtgcgctcgccgttgccgaaaatcgtgccctccacgcgctccgcgccggccatcacgccgagctccgccgcggccgtcgccgtgccgcggtcgttgtgcgggtggatgctgagcaccgcgcagtcccgatgccgcaggtgcgtgtggacgtactcgacctgatcggcatagcagttcggcgtggcgagctccacggtgttcggcaggttgataatcgccttctccgccggcgacgcgccgagcgcctcgagcacgcggtcgcagatcgaaacggcattttcgacctcggtgccggagaagctctcgggcgaatactcgtagcgcaggcgcatctgcgggtattcccgccgcatcgcctccgccatcgtgcggatcagcgaagccgcctccacggcgatcgcggtcacgccggccacgtccgtgtcaaagacgacctttcgctgtaaggccgacgtggaattgtagaagtgcaggatgacgtttttcgccccgcggatcgcctcaaacgtgcgctcgatcaggtggcggcgcgcctgcacgagcacctgcaccgtcacgtcgtccggaatcaggttctcctcgatcagataccgcagcgtttcaaattccgtttccgaggccgccggaaagccgacctcgatctccttgaagccgatctctgcgagcagcttgaaaaagacgaccttttggtgcaggttcatcggcgtgacaagcgcctgattgccgtctcggagatcgacgctgcaccactgcggcgcgcggcggatcacccggtcgggccacgtgcgctccggaaaatgaatcggctcaaacggcctgtattttttatatcccgtctccatattctctcccccagccgcgggcgcgttcaatctataaaggtgctttcctcatactcgaggataagatacacgttgtccagctcgatctgggaaagccgctccgatgcgttcgcatcgaacgtatcggggtctacggacggcgtgtaccacggcatcgacgcaaaataggcggcgagttcctcatcccggaaaatgcggccgtgccgcgcgtagatctcattgcgcgccacattgcattcccaccggctcagcccgtacagctcccacgcctcgatgcggcgcacgctgctttcgggcagcacgtaatccgcagaggccgccggcaccggcgttgcggtcggcaccggcgttgcggtcggcacaggcgttgcggtcggcgcaggcaccgcggtcggtgcggaggtcggcgcgggcgtttcctcagcggacgctgcgggcggcgccgtctcctcggctgaggcgacgatctcccgcacggtctgccgctccgccagtgcgccgaacgtgctgcacccgcacagtgcgaatactaggacaatgccggcaaacagataaagtaattttcgcatcgctgttttacacgctccccttatttctcttcctttttcccgtaagcgcggtcggctgcctcgcgcgcgaggtcgatcaccgagtattcgcgcgctgcgccgctttccgtcaccggcagcagctgatacacctctgccgccatgccgcggctccagagcatcgggtcgatgcgcatcgaatagccgtgcccgttctcgcacatccagtccgtcatcttggcgcgcggcaggccgtaggccgcgagcagcgtcatgatcacgccgccgtgcgtcacgagcaccgcgctttcgtcgcccgccgtcatcatattgcgcacgagcatctcaaagccggcgcagacgcgctgcatgaacacgatgctgctttcgccgttcggcggcgcctcgtgctgcccgccgttcatccacgcggtgaagcgcgggtcgttttgcagttcctcggccttcttgttctcccagtcgccgaaatcgcactcggcaagctccaaaatgacctcggggtccgcggtcgggtacagcaccttcagcgtgtcgacacagcgcacgcacgggctcgcgtaatacttcacggcctcgggatacacgcccgttcttttcagttccaaaagcgcctgcatgccctcgcgggcgagcggcgactgcgtgcggccgacataccggccctccaaattgccctcgcagataccgtggcggatcagatgaatggtataagatttcatgaaacattcctttccgggcacagtaccggtgaggctgcgccgctttctacgatattcggacgcttttcccggaaaaaatcccatcaatcggaaaaaagtgcgtccaagctgtttacttctcggataaattcgtttataatttacccgatgttatttttatgctcaggtggtgaacggacaggtgaacaatgattttccgcggattctgacgctgctccgcaaggaacggggcgtgagccagaagcaggccgcgcaggacctcggcatttcgcaggcgctgctctcccattatgaaaaaggcatccgcgagtgcgggctcgatttcatcgtgcgcaccgcggattattacagcgtttcctgcgactacctgctcggcaaaacaccgcaccggcagggcgaaaagctgcatgtgcccgagggcgacccgctcgaggccatgccgaatgtggaccgaaaaataatatcgaactccatccatattgtatttggtattctgaaaaaaatcaatagcaaatctctgacacggcaggtcacggtgtatctgagctgcgcggtttacaacgctttccgcctgctctacacggcgaacccgaagaaccccgccgggcttttcgaaacggaggccggactgagcgaggccgtcacaaacgggcggatgcacctttcactcgccaaaagccgcatgctgctttccggcgagaaaagctgcggcgacgccgtgcagagagacgcgctgcccgccctgaacagcaaggcgctttccgccgcatacccggaatgggcgccctctctttttgcgctgatcaggaatacagaaaacgaacacaaggcaaactaacccttaaaaggaggttatcactatgtgcggttttgtaggatacaccggcggcggtgaaacacagtccatggcgccggtgctgcacgctatggcggaccggatccggcaccgcggtcccgacgacgcggattattatatggacggcgacatcgccctcggctttcgccgcctctccatcatcgacctcgagggcggccgccagccgatcctcaacgaggaccagagcaaggtgctgatgttcaacggcgagatctacaactaccagtcgatccgtgaggcgcttgtgaaggccggccacgtttttacgacgaaaacagacagcgaggtgctgctgcacggcttcgaggaatacggcaccggccttttgaacaggctgcgcggcatgttcgcattcatcatctgggataaaaacaccaaaacgctcttcggcgcgcgcgacttcttcggcatcaagccgttttactacgccgagatgcagggcacgctgctgttcggcagcgaaatcaagagcttcgtcgagcacccgcatttcaaaaaggagctcaacgagcgcgcgctcgagagctacctctccttccagtattcgccgggctatgagacattcttcaagggcgtctacaagctgccgcccgcgcactacttcttctacaaggacggcgaaatgaaaaccgagcgctactggatccccgaattcaacgccgaggaggacaagacgctcgactactgggtggatgctatcgaaaagaccttcgacgattccatcgaggcgcacaagatcgccgatgtggaggtcggctcgttcctctcctccggtgtcgattccagctatgtggcctgctccgccgacgtggacaagacgttcacggtcggcttcgacaacggctcaaaatacaacgagatcagctacgcgaaagagctttccgagatgatcccggtcaaaaactattcgaaaacgatttcgcccgaggaattctggggcaatttcggcaagatccagtaccacatggacgagccgctcgccgacccggccgctgtcgcgctctatttcgtctgcaacacggcgtcgcagtacctcaaggtcgtcatgtccggcgagggcgccgacgagatcttcggcggttacaacatctacaaggagccgctcgcggtgcccgcctacaacaagatcccgttcccgatccgccgcgcgatcgggaaggccgcgtcacacctgccgaaaaaatccggcgtcaatttcctgatccgccgcggcaagcgccttgaggaccgtttcatcggcaacgcctacatgttctccgaagcggagcgcaagaagattctgaagatcaaaaccgacgcgccctcccccgctgcggtcgtcaagcccttctacgaccgcgtgaaggacaaggacccggtcacgaagatgcagtttgtcgacctcaacgcatggatggtcggcgacatcctcctgaaagccgacaagatgagcatggcgaactcgctcgagctgcgcgtgccgttcctcgacaaggagatcatggcgctcgcacagcgcatcccgctcaagtaccgtgtcaacagcgagaacaccaagtacgcgatgcgcaaggccgcgctgcgccgcatgcccgaaaagtgggccggcaaaaagaagctcggctttccggtgccgacgcgcgtctggctccgcgaggacaagtattacagcatcgtcaaggaaaaattcaccggcgcggacgcggaaaagttcttccacaccgagcagctcgtgaagctcctcgacgaccacaaaaacggcaaggccgacaacagccgccgcgtctggaccgtatacacgttcctcgtgtggtacgaccagttcttcaacgacgacaacctgcggggctacgcggagaaatccggcgccaaaacggcttaatgggggcataaaagatgatcaacacggaagaacttaaaaggcaggattttctgccggtgctgctcggcagcgacatcaacgtatacggcatggcgcgctccttccacgaggcctacggcatccggagcgtggcggtcggcaagggcattctgcccgcctgcatgaacagcaagatcgtcgaggtgcagaccgtggaaccgcgcctcgaggaggacgaggtattcgtcggcacgctcaaaaaattcgccgagcactacaagggcatgcgcctgctgctcgtcccctgcggcgacaactatatcaaaatgctcgtgcgcaatcaggaaaagctgcgcggcgtctacgaattcgagtgcatcgatgaatcgcttttgatgcgcctttcgatcaaggagagcttttacgaggtctgcgaggagcacggcttctccttcccgagaacgacgacctgctctttcgacaattacaagacaaccgagctgccgttcgatttcccggtcatcatcaagccgtcgaacagcgtcgcatactggaactgcaaattcccgcacaagaagaaggttttcgtcgcacagaataaggcggaatacgacgcgattctcgacgcgatctacggctcatcctacaaggaccacctgattttgcaggagtacattccgggcgacgactcgaagatgcgcgtgatgaactgctactgcggcaaggacaaaaaagtgaagctgatcgcgctgggcaacgcggtgctcgaggagcactcccccgagggcatcggcagctatgccgcgatcatcaacggctatgacgagaagctcaacgaacagatgaagggcttcctcgagggcatcggctacgtcggctttgcgaatttcgacatgaagtatgacgagcgcgacggcaagtacaagctttttgagatgaatctcaggcagggccgcagcagctactttgtcacggcggccggctacaatatcgcaaaatggctcgcggacgacgtgatctacagcaagccgatggaactgacggtcgcgacgaacaaggtgctctacacgatcatcccgacgaagatcatcttcgactactgcccggacgaaaaggtcaaggccgaagcaaaggccctgatcgacgcgggcaaggtcgtaaactcctactactataagaacgaccgcagcctcaagcgctggctgatgttcaagcgcaaccagcacaactattttgaaaaatacaagcgatatttcaacaacaaaggactgcacgactgatgaagagctttggtattgtgggcggcctcggcccgatggcgacagcgtatctgctcgagctgatcgtcgacatgacggacgcaaaaaccgatcaggagcacgtcgacgcgattgttttcaaccgcccgagcgtgcccgacagaaccgcatatattctcgacccgacgaagccctcccccgtgccgccgatggcggacatggcgcaaaagctcgaagcgctcggcgtctgcgccatcggcaccccctgcgtgacggcgcacagcttccatcaggcattgcagagcagcgtgcatgtgccgttcatcaacatggtgcaggaaacggctgcctacctgaaaaacgccggctgcaaaaaagcggggattatggcaacgaccggcacggtacataccggcctgttccagacggcgctctccgccgccggcgtaccctatgcgctgccggacagcgcgatgcaggcgtatgtgatgtcgctgatctacgactgcgtgaaggccggcctgcccgccgacatggagaagttccgcgccgtatccgacgcgctgcgcggcgcaggctgcgacgcggttatcctcggctgtacggagctttcgatcatcaagcgtgacaacgacatcggcggcggctatctcgacgcgctcgaggtgctggcccgtacggcggtgctcacctgcggcaaaaagctcaagcccgcctatgattcccttttgaaataacccaaccccgaaaaaggaggccctcagtatgtgcggctttgcaggctatatcaacaactacgccacattcgataaaatggaggtcatcaaggccatggcggaccggatcgttcaccgcggccccgacgacgcccactactacgtggacgacggcatctcccttggcttccgccgcctttcgatcattgaccttgagggcggccgccagccgattctcaatgaggacggcagcctcgtcctgctctttaacggcgagatctataactaccagtcgatccgcgaggagcttctgaaagccggccacgtctttacgacaaagacggacagcgaggtcatcctccacggctacgaggaatacggcaaaaagattctcgaccgcctgcgcggcatgttcgcgttcatcatctggaataaggagacaaaggagcttttcggcgcgcgcgatatcttcggcatcaagccgttctactattatcggaaagacggcgagttcctgttcggcagcgagatcaagagctttctctcccacccgaatttccagaaagaattggacgaggacatgattccgctctacctttcctacgagtacatcccggacgagcgcacgatcttcaaaaacgtgttcaagctgcccggcgcgcactgcttcacctataaggacggcaagctcaaggtcgagcgctactaccatatccagtacaagatcgaggaggacaagaacctcgaatactgggaggacgcgatcacaaaggaattcaccgaatccgtcgcgatgcaccagatcgccgacgtcgaggtcggctgtttcctctcctccggcgttgattccagctacgtcgtcaaggaggtctcaaagggcaccgagaaaatcaagacgttctcggtcggctacgaggaggaaaaatacagcgagctaccgtacgcgcaggatttctcgagcgtcgtcggcgtgccgaacatcgcaaacaaggtttccgccgacgagtttttcgacgcggtgccggaaatccagtattttatggatgagccgctgccgaacccctcggagattccgctctacttcctcgcgaagaacgcgcgcagatacgtgaaggtcgtgctttccggcgagggcgccgacgaactgttcggcggctatccgatgtaccttgcgggcggccatttcgaccgctacacgcacaaggtgccgcggccgatccgcaaagcgctcggcacggtcgcacgccatgcgccgagcttcaagggcaagaatttcatcgtgcgcggcgcaatggagccgtaccagcggttcatgcgcgcaaactacgttttccagagcgcggaacgccagaaatatctcaagcgcccgatcgcgacgaagctgcccgaggaatacagcaagcgctatttcgacgaggtgccgaatctcgacgagccgacgcagctccagtacgcagacatgcacacgtggatgatctacgatatcctcctgaaagccgaccgcatgagcatggcaaactcgctcgagctacgcgtgccgttcctcgaccgcaagatgctcgagctttcgacgcgcatcccaacacgcttccgcgcggccaacgagacgacgaaaatcgccctgcgcggcgcggcgatcaaacagctccccgagcgcacggcgaacaaaaagaagctcggcttccccgtgccgctgaacgactggctgcgcgaggacaaatactacaacaaggtaaaggccgcgttccagagcgacatcgccgaaaaattcttcgtgaccggcgagctgatgcgcctcctcgacgaccacaagagcggcaaggcgctcaacatgcagaagatctggtcgttctacacctttattctctggtacgagcagttctttgtcctgaactgagataaaaacaagcgctccaaagcctcgaggcgcttgttttttgaaacttcctcgatccaaaacacgcgggcccgccggtgactgccggcaggcccgcgttattttattgcagctcagtttgttaaggcgtcgttttgcatcatttctgatgcttgatgaggccgaaagccttcgaaagctccatgacgacgagcgggataagcgagagcccgaggccggtcagatagagctgcggcgaaagcgtgacgagaccgaatgcgaccgatacgggcgtgaacagcacgagcgccaccagtatgacggaagccaagcacgcgaggttcagcctgcggttcgtgaaaaagcccgtcttgaacaaggagcgctccgagcgcatgttgaatgcctgcacgacctgcgacagcgcgagcaccatgaacgccagcgtctgtccgccggcgatctctccaaacgactgccagccgatccagaatgccgcaagggacagggcgccgaacatgacgccctgcaaaacgacgcgcacgccgagcccatgtgcaaaaatcccctcgtttttcggctttggcttctgccgcatgatcccgggctccacgtcctccatgccgagcgcgatcgccggcaggctgtctgtgaccagattgatccacagaagctgcatcgaaagcagcggcgagcggtgccaaatcagcatggccgcgaacacggtgatcacctcgccgatatttgtgccgagcaggaagccgaccaccttgcggatattcgcgtaaataccgcggccctcgcgcaccgcgtcgacgatcgtcgcaaaattgtcgtcggtcagcgtcatatccgccgcgcccttcgcgacgtccgtacccgtgatgcccatcgcgcagccgatgtccgccgctttcagcgccggcgcatcgttcacgccgtctccggtcatcgcgacgaccttttccttcctctgccacgctttgacgatgcggattttattctccggtgaaacgcgcgcgtacaccgaaatgtcctccacggcgttgtccagctccgcctcgctcatcgcgtcgagctccgcgccggtaactgcccggtcgccgtccttcaaaatgccgaggtttttcgcgatcgccgaggctgtgacgacgtggtcgcccgtaatcataaccgggcggatgccggcctcacggcagaccgcgacggcctcgcgcgcttcctcgcgcggcgggtcgatcatgcccacaaggccgaggaaggtcagccccgtttccagcgtttcgggttcgagcggctcgggcagatcctcaatctcacgcaccgcgactgccagcacgcgcagcgcactgcggctcatctcgtcgttgatctgccgcgcgcgctcgatattgcccgccgcacacagcggcgcgatgccgtcgaacgcgcccttgacgatcacgagcctgcggccgccgtgctccacgacaaccgacatgcgcttgcggtcggaatcaaacggcagctctgcgatgcgcggaaagcccgcgcgcagcgcgtctttcgtatcgccgaacttgtgcgcggcaaagacgatcgccgtctccgtcgggtcgccgatatgcgtcgcggtgccgtcgggcgcaaaggtcacggtgccgtcgcagcagagcgccgccgtgcgcacgagcgtgcgtgccgccgcgtcgccggaatcgaccgccccggccgcaccatcgagatatgccttttgcagcgtcatgcggttctgcgtcagcgtgccggttttatcggagcagatcaccgaagcgctgcccagcgtttctacggcgggcaggcggcggatgatcgcgtttttcttcaccatgcgctgcaccccgatcgaaagcacgatggtgacgatcgccggcagaccctcgggaatcgccgaaaccgcgagcgaaacggccgtcataaagatctcgagaacgttgatgccgttcaaaaggccgaccacaaagatgaccgcacatgcgccgagcgccacaaaaccgaggcttctgccgagcgacgcgagcttccgctgcagcggcgtctgcgtctccgcttcgccggagagcaggccggcaatcttgcccatttcggtctgcatgccggtcgctgtgatgactgccgtcgcggtgccataggtgatgctgcacccggaaaagaccatgttgacgcggtcgccgagcgccgcgtccgctgcaaccggcgcctgcgcatccttctccgcgggaacagattcgcccgtcagcgccgattcttcggatttcagccccgcgctttgcagcaggcgcgcgtcggccggcacaaaatcgccggcctcgagccggatgatgtcacccggcacgagcgccgccgcctcgacgacctgctccgccccgccgcgcagcacgcgcgcatgcggcgcggacaggcccttgagcgcgtcgagcgccttctccgccttgctttcctgcagcacgcccatcacggcgttcagaatgacgatcagtaaaatcagcgccggctcaaaaaattcgccggggttcccctcgacgcacgcgacgacaaaggaaacgaccgccgccgcgatcagaatcagaatcatcgcgtccttaaactggtcgaaaaagcgctgcagattcgtctttttctttttttcggcgagaacgtttgcgccgtaccggccaaggcgtttttccgcctcggctgcgctcagcccctgcgccggatcaacctcaagcgctttgaggacgtccgccggcttcgatgaaaaatgctccacaagataacctccttttatttccaaaagtctaacctaaaaaaatgaacgctgcgtaaacaaaatataaagatatagccaattgcggtgcgcggctttacggtgtttttgaatgcagcacagcccgtgcgagccgctccaccgcctcggggatgcggtcatccggaatcgaggaataaccgatgacgaacgccggctccggccggtcgggcggcgcatggcggtaatcggaaagacaggtgatgcgcacaccctcttggagcgcgcggcgctcgatggcctgcggcgcctcccctgtatgcacgcgcaggagaaagtgcaggccggattccgccccctcggtttcggcgacgcggaacagcccgctgcgctccatctgcccgaggatgcggtccttcttccatttatagcggttccgcatgcggttgatgtgcttttccagatgcccctcagcgatgaatttcgccagtgtgtactgctcgagattcgaaaccgtgcaggcgtaaaagccgagccgcgcgtaaaagcgctcggcaagcggcgcgggcagcaccatgtagctgatgcggatcgtggaggcaaggctcttcgtgaacgtgttcatatagattacgcgccctccgccgtccatgctctgcaaagccgggatcggccggccggtcaggcggaattcggagtcgtaatcgtcctcgatgatataccgctgcggctgctcctgcgcccaccgcagcagcgcgtaccggcgtgcggccggcgtcacgatacctgtcggaaagtggtgcgaaggcgagatgtgcaggatgtctgcgccgctctcccgcagcgcgtcgggccgcacgccgtcgccgtccatcggcacgaagcggtagccgacgccgtggctctcgtagatctgcgcaatcttgcggtagcccgggtcctcgagcgcgtaggttttgtcgaagcccagaagctggatcaaaagcccgtagagatactccgtgcccgcaccgacaacgatccgctccgggtcagactcgatgccgcggaacgcatacaggtgcgccgcgatcgcctcgcgcagcgccaaaacgccgccgcacggcgcgttcgccatcagctcggcattctgcgcggagatcgtcccgcgcatcagccgcgcccatgtggcaaacgggaagttttccgggtcggtgcggttgctcgaaaagtcggcgaagtatttcggcgcttccggctttatcgccgagggcgcggccggccgctcccgcacggggccgcgctccagcgccgcggcaaagaagccctttttcggcacggcatacagatagccttccgaaatcagctgcgcatatgcgttttccacggtgatcacgctgacgccgaggttttccgcaaagctgcgcttcgagggcagcctcgtgccgggcgcaatctcgcccgaaacgatgtcgtcccggatgcaccggtacaggtggatgtagagcttctcgccgccgaggttttcaaatgaataggtcagcatgcaccgccctccctttctggccctttccgcttcactgaaaccaacggatcaaagcagttcagatttattatagcagaacgctgcttctctgtaaagcccgcagatgcgcccttccgcaccgcaaaacgccgctttcgggtcgtcctctcccctctgcacgcaaaagccgccggaggcgcttcccccggcggccgcatcgctgcttttactttttctgcccgtaatacgcgttcgcgccgtgctttctcaggtagtgcttgtcgagcagcgcctgctgcatcggctcgatcgcggggttcatcatcaggttgtgccacgccataaaggccagctcctcgagaacgaccgcattgtgcaccgcgttcatcgggtcggtgccccatgtgaacggtccgtggctgtgaacgagcaccgccggaatgtcgtccggcgacttgtcccggaacgtctcgatgatgaccgcgccggtctccttctcgtattcgccgccgatctccgcaggcgtcatcttccgtgtgcaggggatctccccgtaaaagtagtcgccgtgcgtcgtgccgagcgcggggatcccccgcccggactggctgaacaccgtcgcccagcggctgtgcgtgtgcaccacgccgccgatattcgggaatgccttgtagagctccgcatgcgtcggcgtgtcggacgaggggttcaaattcccctccaccgtctttcctgtgcggatatcgacgagcacgatgtcctccgggcgcagcacgtcgtattcgacgccgctcggcttgatcgccatgataccgctctcgcggtcgataccgctgacattgccccatgtgaatgtgatgagatggtgtgcaggtagaagcatattcgccttatacacctgttccttgagcgcttcgagcatcgcttattcctccttcgtcagcttgtaaagccgcgcgccgtgcggctcgatctccgccgagatcgtcccctgcgcgcggcacgtcgttttcgtccaaagctcttcggcggtatacgccgcatcgccgagaagctctgtaagatcggcagatatgctcgccggcgcttcgctgaggttgaacagcgcaatatacggcacatcgcccacaaagttcagccacgcggccttccccgcatcgcggaaaagctgcagcggtgtgccgccgtgctggttcaggcgcagcatctcgtcgtttgtcaaaagcgaaagcgtaaacgcgtcgttgtcccgcatttcaccgcccataatcagcggcgcgcggaagatgccccagagcgacatcagcgcgatctgctccggcttcgtgaaattcgtgtagtggcccctgccgtccgccgtaatggcgatgcggcccagcggcagcatgtcgcagtccggatactggccgggcttcacgtgcgcctgccagacctcgcagcgccagaacatctcgagcaaagacggccagttgtcccagaaatcgtcggtgatacgccacatgttggcgtgctttgccatgtgccacgcctcgctgataacggccgggccgggcgaaagactgagcaccatgccgcggccgcagcggtcgatcgccgtgcggatcatctcgatctcgcggcgcgccgagtattcctcaagcggcgtcgccttcacgttgcagatgtcgtctaccttgacgtaatcgacgccccagccggcatacagctcgaagatcgaatcgtaatacgcctgcgcgcccggcttgtcggcgtcgataccgtacatatcggtgttccacgcgcagatcgagctgcggtgcgcgatctcgtgacaggaaatctccgtgcccttcaccgtcatgcggttgtgcacggcgaggcgcggcacgccgcgcatgatgtggatgccgaacttgagtcccatcgcgtggatcttatcggcgatcggattaaagcccgcgccgttcgccgcggacgggaaccggaccgggtccggaaccgcgcgcccgttttcatcgaggcagagctgcgcgaagcggttgtattcccagtggtgcttgccggcctccggctcataccactggatgtcgcacacgacgtattcccagccgtgcgccttcaaatgatccgccatatactgcgcgttgccgagcagctgttcctcgttgacggcggggccgtagcaatcccagctgttccagccgagcggcggcgtcagggcgatctggtctttcctgtacatactgtttcctcccgtttggtttctattttcattataccaacctgtccgtacaagtcaagtccaaaacgaaaaaagaacgacagcgcccgcaaagccggcggaatccggccgccgggccagcgcattttcccctccgccgcggcgggtaaactcaaaaaaattgtccggcgccccgccgaagcgaggtccggacaaattcaatttgcagatcagacctcgacgacgccgtcgaagatcttctccgcgccgcccgtcatcaggacgcggtccgccgtatagcgcacagagagatcgccgcccttgaggatcacacggatgtcctcgcccatcgtgcagcggccgttgagcgtcgccgcaaccaccgccgcgcaggcgccggtgccgcaggccatcgtctcgccgctgccgcgctcccagacgcgcaccttgagcgtgcgctcatcgacggcctcgatgaactcgacgttcacgcgctccgggaagagcgggttgttttcgaacttcgggccgatcgcatcgagatcgagcttatcgaccgagggtgcaaagaccgcgcagtgcgggttgcccatcgaaacgcaggtgatgtaatactcgtgtccgtcgatgacaaccggcttgttgatgacgctgtcgccgtcgagcttgaccggcacaagcgccggcgcgagctccgccgcgcccatatcgaccgtgatgcgatacgccttgccgcacatcgtcatgacgctgcattccttaacgccgctcttcgtctcgatgcgcagcaccggcttcttcgcaatgccgctgtcatagaggtatttcgcgacgcagcggatgccgttgccgcacatcatgccctcgctgccgtcgcggttgaacatgcgcatctgcgcatccgccttgtcggaggggcagatcaaaatcacgccatcgccgccgacgccgttgtggcggtcggagaggtagatcgagaggaattccggagaggaaacctcgttttcaaagcagttgatatagatgtagtcgttgctgcacgccgacatcttcgtgaacggcagcctgaccttctcgctcttgaggttgttgatgtccacgatctccgtgttgtacggggtgtagcggctcatcaggctgtccgcaagcgcgtttgcggtatcgatcgctgtcaggcacggaatgccgagcagcgcagccttgcggcggatcttcacgctgtcgcgcgccgggtttctgcccttcgccgaggtggagatgatatacgcgagcttcccgctctcgagcagcgtgatcgtgttgaccgggctttcgtggattttatcgacgatcttgacggagaggccgagctttgcgagcacgctcgcggtgccggtcgtcgcgtagagcgggaagcccatcttatcgaacttcttcgcgatctcgccgatctccttcttgtcgccgtcgcgcacggtgatgaaaacgccgccgttcttgttcatcttgctgcccgaggcgatcaggcccttgtagagcgcctcctcaaggttgttgccgatgccgagcacctcgccggtggatttcatctccggcccgagctgcgtatcgacgtcggtcagcttctcaaaggagaacaccggcaccttgaccgccgtgtacggcgaggtcttgtagaggcccgtgccgaagccgaggtccttgagcttcatgccgaggctgaccttcgtcgcaaggtcgcacatcggaacgcccgtaaccttgctcaggtacggcaccgttctcgaggcgcgcgggttaacctcgatcacgtagatctcgcggtccatgatgatgtactgcaagttgatgaggccgatggccttgagctccgtgcagagcgtctcggttgtcttgacgatcttcgcgctcagctcgtcgtcgatgtcctttgccgggtagaccgcgatgctgtcgcccgagtggatgcccgtgcgctccacgtgctccatgatgcccggcagcaaaatctcctcgccgtcgcagatcgcatcgacctcaatctccgtgccgctcaggtacttgtcgataagcaccgggttgtcctgcttctggcgcaggatgatcgccatatactccttgatatcctcgtcgccgtaggcgatgatcatgttctggccgccgagcacgtaggaggggcgcatcagcaccgggtagccgaggtcgcgtgccgctgcgagcgcctcgtctgccgtcatgaccgtatggcccttcgggcgcttgatattgcagcgctcgagcagcgcctcaaagcgctctctgtcctccgcggcgtcgatgctgtcggccgaggtgccgatgatcgggatgttgttctccgcgagggttttcgtcagcttgatcgccgtctggccgccgaacgccacgacgacgcccttcggcttttcgataccgatgatattcatcacgtcctcgctgcaaagcggctcaaagtagaggcggtccgccgtgtcgaagtccgtggaaaccgtttccgggttgttgttgatgataacgacctcgtagccgaggcgctgcaaagattcgacgcagtgcacgctcgcatagtcgaactcgatgccctgaccgatgcggatcggacccgagccgagcacgacgaccgtttccttgccgctcttgccgatgaactcgagcgcctcgttctcgccgccctgctccggcgtgtcgtaggtgccgtagaagtacggcgtcgtcgccgagaactcgcccgcgcaggtatcgaccatcttaaacgtcgcctcgtgcttgaattcgggcttcgtgccgctgaggcgggtcagcgcgtcgtcggtatagccgagcttcttgccgcgcgtgtactgcgctttggtcagcggcttgccggcgatctcgcgctcaaaggcaagcaggttgccgatcttatcgaggaaccacatgtcgatcatcgtgaagtcgtggatctccttggtggagatgccgcgcttcatcagctcgtacacagcgaacaggcgctcgtcggtggcgtccttcaggatctgccagaggtcctcgtccgcaaagtttgcgaacttcggcatgttcagcgtgtcgagcgagatctccgcaccgcgcacggccttcatcagcgccatttcaaacgtatcggcgatggacatgacctcgccggtcgccttcatctgcgtgccgagattgcgctttgcatagacgaatttatcgaacggccacttcgggaacttgaccgcaacgtaatcgatcgacggctcgaacgccgcgtaggtcttgccggtgacggcgttgacgatctcgtcgagcgtgtagccgatcgcgatctttgtcgcaaccttcgcgatcgggtagccggtcgccttcgaggcgagcgccgaggagcgcgacacacgcgggttgacctcgatgaccgcgtactcgaacgacgtcggatgcagcgcgaactggcagttgcagccgccctcaacgccgagcgcatcgacgatattgatcgccgcggtgcggagcatctggtattccttgtcggagagcgtgaccgccggagcgatgacgatgctgtcgccggtgtgcacgccgaccggatcgaggttctccatcgagcagaccgtgatcgagttgccgaggccgtcgcggatcacctcaaattcgatttccttccagcccgcgatgctcttttcaacgaggatctgcgtgatcggtgagagcgcgaggccgttcgccgcgacctccatcagctcctcgcggttgctgacgatgccgccgccggtgccgccgagcgtgaatgccgggcggatgatgaccggatacgtgatctcctcggcgaactccagcgcgtcctccaccgtggtgacgaccttcgaggggatgcagggctgattgatgctctccatcgtatccttgaagatctggcggtcctcggccttatcgatcgtctccggagaggcgccgagcagacggacgttgtgcttttcgaggaagccctccttcgcgagctgcatcgaaagcgtgaggccggtctggccgccgaagccggaaaggatgctgtccggcttttccttctcgatgatgcgcttgattgtgggcagcgtgagcggctcaatatagatgtggtctgccatggcgttgtcggtcatgatcgtcgccgggttcgagttgacgaggacgatctcgatgccgtccgccttgagggcgcggcaggcctgcgtgcccgcgtagtcgaattccgcagcctgaccgatcacgatcgggccggagccgatgacaagaactttcttgatgtctttattcagtggcatagctgtaaacattcctttctatatctcagaggcttctgcattcgttcgggcggcggccgctttccgcagccggcgcgccggtccgtcactttttcatcatgtcgaagaaccggtcgaacaggaaggatgtatcgcaggggccgccgcaagcctccgggtggaactgcacggagaacgccgggatattcttgtagcggatgccctcgcaggtcttatcgtttacgttgatgaagtattcttcggcgatcgccttgtcgatgctcgaggacatgaccgcatagccgtgattctggctcgagatatacacgcggccggtctcgaggttcttgaccggctggttcgcgccgcggtggccgtacttgagcttctcggtcttaaagccgtttgcgagcgcgagaagctggtggccgaggcagatgccgaaaatcggaataccgagctgcatcatcgcctgcaggttgcggatcacctcggggttgtccgccgggtcgccggggccgttcgagagcatgatgccgtctacatgcagcgccttgatctgctccgccgtcgtatcatacggacatataatcacctctgcgccgaacttctcgagcttgcggcggatgttctccttcatgccgtagtccatcagcgcgaccgtcaccttcttattcgggttttcgcagcgcttgatctccttcaccgaggtgctctccaccgcgtccgtcacgcggtaggcgcggagcttctcgaaatcgacgtgctccgggtccgccgtgatgacgccgttcatgacgccgctctcgcggatgatcttcgtgagcgaacgcgtgtcgataccgcagaggccgatcacgccgcgctctttaaaaaaggtgtcaagatcgccctcagaacggaaatttgagggcgactgacaccattcttttacaatataaccgcgggggccgatcatatccccctcaaagtcggagggaatgacaccgtaattgccgatcagcggaaatgtctgcacgacgatctgaccgaaatagctcttatcggtgagtgtttcgaggtagcccgtcatgccggttgtaaagacgacttccgccatcacctcgccggccgcgccgaaggattcgccgctgaaaacttttccgttttcgagtaccaaatatgctttgttgcccataacgtttcgttcctctttccctagaataattcccgcttggcccccgcacagggcggcgggctttcgcccgtgccccgcgccggaacggcgggtttgtatgaaaggcggccggggctttccgtgcggaatcccccgccacgcccgcattccaaaatcattgtagtctagccgtacatcttcaggatgcgctcggcaatgctctttttcgaggcgcgcatgtccatcgcctgtttttcgatgtaccggtgcgcctgctgctcgctcatgcgcaggtactcgaccaaaacgcacttggcgcgcgccacagcgcggatctcctccacacgctcatgcagccttcggttctcctcctccagctcgcaccagcggctgcgcatcgccgcgagcaggtacacagcctgatcgaacagcctgcgcgaaaccggcctgcacagcacgatgacgccgcaggactccattttggcggcggcctcctcgaactgcccgtcctcgacgagcattagaacacccgccggggattgcgccgcgtgctcggcaagcgcatagccgaattcctccgcaagcggcgtgtcgataatcacgagatcgcagccgttctgctcgagcatcgcgcgcgccgccgcgccgttctcagcgtgcgaaagcgcctcacgcatagggtcgggaagccagtcgcaggctgcgcttttctgcgcggcggatacgagcagaacgctgggccgcggcttatcgtttttcatcggcttccctccgttcgcataccgggggcaggcagccgtccggcggcccccgcccgcatgtcagcggcagaactgacttctttctccaaaatttaatattatagcatgcaggttcaaaatgtcaactgttttttgaattttttcggcggcggccgacaaaggccgcgcggcccgcaaggctgtgcgggtgccgtgtccagccgcccgccgcggcacgcaccgcccgaaatctgccgaagcccagagcccgcatgccgcgcccccctgcggggcatgctccggctttcggatacagtctaattatagcacaggcgcttttttcttggcaatctgcataacgcacaatgttttctaacagaaaacgccgtgtgttgacacgcgccgccgcgtttcgtactgcacccggaagcgccgccgtcccgcgcccgaatccccccgcgcctcagcccgccgccggccggcagcgcttatgtccgcggggaattccagcccgcagcgcccgtctttatccccataaatttcgcacgcacagcgcgcttcgttgtcgcattcccgcaatttcgggccgcacggaaaaagagtgttgacaaacggtgcggaaaggttgtaaaatacgactcatagcatagcaaaggcgctgtggttgaagctcgtttggagctttcatcctcagcgcctttttcggtacatacgtttcccgtgtgaccggagacaattatgaatgaggaaagagtggttttatgagctgcacaacacacaagagcgtgccggatctcttctcgagcatggtctttaacgacggtgtcatgcgcgagcggcttccgaaggacgtctacaagtccctgcgcaagacgatcgacaacggcaaggatctcgacatcaacgtggccaacgcggttgcaaacgccatgaaggactgggctgttgaaaacggcgcgacgcactacacgcactggttccagccgatgaccggcatcaccgccgaaaaacacgacagcttcatttccccgaccgccgacggccggatcatcatggaattctccggcaaggagctcatcaagggcgagccggacgcctcctccttcccctccggcggcctgcgcgccacctttgaggcgcgcggctacacggcgtgggatccgacctcctatgcgtttatcaaggacaactccctttacatcccgacggcgttctgctcctacggcggcgaggtgctcgacaagaaaacgccgcttctgcgctcgatggaggcgctcagcgcgcaggcggtgcgcattctccgcctgttcggcgacacggcgacgaagcgcgtcatcacaacggtcggcgccgagcaggagtatttcctgatcgataagaagctctacgaccagcgccccgacctgctcttcacgggccgcacgctgttcggcgcgcgcgcgccgaagagtcaggagcttgaggaccactatttcggcgcgatcaagccgcgcatcgccgcgtttatgaaggagctcgacgaggagctctggaagctcggcatcctcgcaaagacgaagcacaacgaggtcgcgcccgcgcagcacgagctggcgccgatcttctcgacgacgaacgtcgccaccgaccacaaccagatcacgatggagacgatgaagaacgtcgcccagcgccacggcctcgtatgtctgctgcacgaaaagccgttcgccggcgtcaacggctccggcaagcacaataactggtcgatctcgaccgatacgggcaaaaacctgtttgagccgggcaagctgccgcaggaaaacgcgcagttcctcctcttcctcgccgcggtcatcaagggcgtcgatgagtatcaggacctgctgcgcatttccgtcgcctccgcgggcaacgaccaccgcctcggcgccaacgaggcgccgccggcgatcatctccgttttcctcggcgacgaactgaccgcgatcctcgacgcgatcgaaaccggcaccgtctacggcggcacgctgcgcgtcaatctggaaatcggcgtcaacgtgctgccgaccttcgcgaaggatacaaccgaccgcaacagaacctcgccgtttgcctttaccggcaacaaattcgagttcagaagcctcggctcgcagctcaacatcgcatgtccgaacatcatgctgaacacgattctcgccgaggagctccggcagtttgccgacgagctcgagggcaaagaggatttcaacggcgcgctcaacgcgctcatccggcgcgtcatcaaggagcacaagcgcatcatcttcaacggcgacggctatgcggacgcgtggaagctcgaggcggaaaaacgcggcctcaccaacctgcgcaccacggtggacgccctaccgcactactcggacccgaagaacctgaagctcttcgccgaccataaaatttacaacgaggtcgaggtgcattcccgcgaggacatcatcctcgagacctactcgaaaaccatccatatcgaagcgctcaccgcgagcgacatggtcaagcgcgatattctccccgccgtttcggcctacgtcgccgagctgacggacagcgtgctgcgcaagaaatcgatcggcggagacattccgtgcagagcggagctcgacatcatcaagcgcctctccggcctcgaggactgcgcttacgagaagctctccacgctggacagcgccgtcatcggcgtgcgcgaggccgacgaggacccgatcgcggtcgccgcctattacaaagacagcgtgatccccacgatgacggagctccgcgccgtcgtagacgaaatggagacgctcgtctcctcaaaatactggccgtacccgacctatgcggatctgatgtaccgcatataaacaaaaccgcagacacaaacacacaagggcgtgtgcgcagaaaacccgtttttcgcgcgcccctgcgcttttggataagcccgcccgggcgcatccccaaccaaagcatacgataaatcattcgcgttcctagaataagactgcaagaaccctgccgggaacgaccggcagggttcttgctctatgcgctttattcttctgtgccctgcacgacgatctccggcatctccgcgcattggcggcgcagggattcgatccctttcctgcagttttccttcgtgctgtagcctgagcccgccgcgatgttctgcccgtttctggcgagcagccgaaagcggaaccggcccgcgcggtcgcggtagatctcgaatttcgggtgcttctccggcgcgaacccccgcgcggtctggtcctccaccgcggccagcgccgcatggcggatcacgctctcaatgcccttgtagcaggcttccatgctcgcgtaaagctgcgagacggctaccgtctcaccatttcgcgccttgaggtgaaacaccacgccggtttccgttcttcgaatcacaaattttcccatatccctatcccctttatacctgtattattattttatcatattgcctttgcaaattccagccgccgcagaaaaaatagctttgtaatttccgataaaaacaatttgaatttctcaccgcaatgtggtatacttattaaaatatcctatcatcgtaaaaagggggggtttgccgtgaagattcaggaatccgccgaaaactatctggagacgattctgattctttccgaaaaaaacgcgcacgtgcgctcaatcgatattgccaccgagctgcgcttcaccaagccgagcgtcagcgtcgccatgaaaaagctgcgggaaaaccacttcattcaggtggatgccgacggcttcatcacgctcacggaaagcggtatggagatcgcctcgcgcatgtacgagcgccacaggctcctttcagactggctcgtgtatctcggcgtgccgcgcgaaaccgccgtggaggacgcctgccgcattgagcatgtaatcagtcaggagagcttcgagaaaatccgcgcacacgtcaccgaaatgaaagagcttctgtaaaaacaaatggagaggactgcacttccggcacaccggcggcgcagtcctctttctttattcgaaaaaccggcggggcggccgctcacctgaggcccatgagggcacgctcttttggaaaaacacctgcgcgtcacatgccgcggtgcggcggcctttccttccgctttccgcgcggcagcaagcctgccgcttcgcacgccgtcagccccgtacaaaaaaacggcccccgccggtttttaccccggcgggggccgtccgcttcggcgccgcttgcacagcgccggattcgtttagaatactgttccgggaaacttacttgtcccagccgtcatagcggccgagctggcaatcgttgttgccggaatcggtggtccacatctcgagcatgttgaacggatcgctgtaatccatgatccagccgttgcggcaaacatcaaagttgccggccttgcgctcattcaggaagacgttccactcctgctccttgatcgtcatgttgatgccgaccgcagcgaagtcctgctgcagcgcctcagcaatgtcaacgttctggcccggcgtgtttacaatgtactcgaagttgatcggcgtttcagcggagagcacgccgccatcgaacttgtagccaatggattcgagcatcgcgataccctcttcgacattcgcctcaaagtcggccggatctgcgctgtaataggatgtattcttgaattcttcgccgttgccgtcgaggcagccgtacggaatgaaggaatccgccggaacctgaccggtctgcgtgatgctcgtaacgatatagtcacggtcaacaagcagagccagcgcgcggcggaacgtgttcgcctcagccgcagtcatgccgtcgaacaggtcgctcgtgacattgaaggaaacatacgtgacgcccagcgtatcgacaacatagaattcagagctttccttgacacccgcgatctcagcggtcggaatgccgtcggagaaatcaaggttgccggcattgtaagccgcgaaggttgcgttctcgtcggaggagagcatgaactcctgcttctcgatcgtgacctcgtccgcacggtggtaattcgggttcttctcataggtcatggagctgttgtgctcccacttcgtcagcgtgtaagcgccgttggaaacgaagccggcctcaagcgcccatgcgcccgggttcgtgccgtccgggtccgcagcctcaacggaagcctgatggaccgggaagtaggtcgggaacgcaagaagatcatagaaatatgcgcagggatattcgaggttgatcgtcagcgttttgccgtcctcggaagccgtgacatcgagtttagcgtcgggattgacaaagttgccttcctcgtccatctccgtcatctcggcatagcccttgatcggcgcaaacatatagccgtagtcggaagccgtcagcgggttcgccgcgcggttccaggaataaacgaaatcgttcgcgttgagcgggtcgccgttcgaccatttcaggtcgtccttcagcgtgacggtgtaggtcaggccgtcctccgtcatctcgatgttctccgcaaggtcgttgacctgcttgccctccgcgtcgtaggtcatcaggcccgcaaaagcgttgatcgcaaggatcgcgccgtcaaccgtagagttgagcgccgggtccagcttatccggctcagaggccagataagcgcgcagcgtatcggaaccgttctccagcttcgcgaacataaaatacttgtagccgaacggcgtagcatatacattcgtcaggtaatccttctgcagataaatatccgcattgaagaacagcggcatcagcgcgccggtctccatcagcatatcttccgcctgatgcatcagctcggcacgcttcgcggtatccgtgcaggtgcggatctcatcgatcagcgcgtcgtactccgcccagccgttgaccggatcgatcgcatcctcatcgacagtcgcactggactcatccgtgctgctctcgtcggccgcggagctttcggaagacgggtccgcgctggttgtcgtgctcgtgtttccgcaagccgcaagaccaacacacatggtcaggacaagcagaagcgcaatcagctttttcatgttacttacctccaaaaattttcggcatttcgccttatgaattgaaacacggccgcgccggggcgcaaaccgaaatttccaagatttacgccggagctcacttgttccagcaggccaccatatggccgtttccgcggtccgtaagctgcgggcgctccgccgcgcactgctcggtcgcataactgcagcgagtgcggaacgggcagccgctcggcgccttgagcgggctgggcacgtcgccctcgagcacaatgcgcttgcgctcgcgcgcgatcttcgggtcgggcatcggcaccgcggaaagcaaagactgcgtataggggtgaatcgggctgttcatcaaggtatccgcgtccgccagctccatcatcttgccgaggtacatgacggcgatgcggtcggaaatatggttgacaaccaagaggtcgtgcgcgataaacaggtacgcaacgcccagcttgtgctgcaaatcctcgaacatgttgacgacctgcgcctgaatcgaaacgtccagcgcggaaaccggctcgtcgcacacaataaagcggggatcgaccgcgagcgcgcgggcgatgccgatgcgctggcgctggccgccggaaaactcgtgggcgtagcgggtcgcgtgctcggcgttcaggccgacaagctccatcaggctgaggatcttctcgcggcgctcggccttatttgcgtacagcttgtgcacgtcgagcggctcgccgatgatgtcctccaccgtcatgcgcggattcaaagacgaatacgggtcctgaaacaccatctgcatctttttgcggtacggcagcatgttgaccgaaaccggctttgcatgagccggcttgccgtctgccccgagaacgggctttccgtcggcgccgagctccggaacgtcgcccgcgtcgaaaatcgtctcgccctcgtatttcacgcggccgcccgtcggcttataaagctgcaggaggctgcgcccgaccgtcgtcttgccgcagccggattcgcccacgaggccgagcgtttcgcccggcttgatcgcaaacgaaatatcgtccaccgccttgagcggcgtcgtctttgcaaatcccgttcgaatcgggaaatactgcttgaggtgctctacctcgatcagatattcatggctcatcggtagtccctcctcattcctgcccggcggccgggctgtagccccattcgccgttcttatctttcatccagccggtctcccgctgcacatccgccatcgaggagcccgcggcgagcatcgcctccgctttctccttcagcgcgagatcgttgagccagcaggaagccagatgatccttgccgacccagcgctccgccgggacatgctcgagacagaccttcatggccttgtcgcagcgggcgcagaacgcgcagccgctcggcatattcaaaaggttgatcgggttgccggcgatcggaacgaggcgctctttcgagttgccgacgttcgggatcgaacgcaacaggcccttcgtgtactcgtgcgccggctcgtagaaaatcgcatccgcggtgccgcgctcacagacgcgcccgccgtacatgacgatgatctcgtcgcacatcgtggcaatgacgccgaggtcgtgcgtgaccatgatgatcgccatgccgagcttcttctgcaggtcctgcatcagctcgaggatctgcgcctgaatcgtcacgtcgagcgccgtcgtcggctcgtcggcgatcaggacgtccggctcgcaggccagcgccatcgcgatcatcacgcgctgccgcatgccgcccgaaagctcgtaggggtactgcttgacgcgcttcgccggctcgttgacgccgacgagcgtgagcagctcgatcgcgcgggcgcgcgcttccttgctggttttgtccgtgtgcaggcggatcgcttcctcaagctggttgccgatcgaaaacaccgggttcagggacgtcatcgggtcctgaaagatgatcgaacagcatttgccgcggaacgaagccatctgctttctgctccatttcgtgatgtcctcgcccttgtactccacgctgccgccggtgatacggccgttctcggcgaggatctgcatgatcgaatacgccgtgacggatttgccggagccggattcgccgacgatgccgagcaccttgccggcgtcgaggttgaacgagacgccgttgaccgcgtgcacctcgccgttatcggttgtaaaggaggtgtgcaggtcctttacggataagagatgttcactcatgtcgcttacctcctcagcttcgggtcaaacgcatcgcgcaggccgtcacccaaaaggttgaacgccagaacgatcaggcagatcataaccgccgggaaaaccagctgatgcgggtagctcgtcagcgcgccgcgcgcactgttcgcgaggctgccgagcgaaggcatcggcgccgatacgccgaggccgaggaagctcaggtagctctctgtgaaaattgcggaaggaacctgcagcgccaccgagatgatgatgacggagaggcagttgggcaggatgtgctttctgaggatgcggctcggcttcgtgccgatggtgcgcgccgccagaacgtactcgttttccttgaccgtgaggatctggccgcggacgaggcgggccatgccgacccagtacagcagcgcaaaaacaatgaacagcgcgagcatattgctgccgacgctcgcgaacaccgtgccctcgatcgcctttccaagcgtctcgtccagcacgaccgaaagcagaatgaccatcaaaaggtcaggcagtgaatagatgatatcgcatatacgcatcatgatcaggtcgaccttgccgcctgcgtagcccgcaaccgagccgtacagaacgccgatgatcataacgaggatactcgcaaagaagccgacgagaagcgacacgcgggtgccgtagatcacgcgcatgaaataatcgcggccgaggctgtccgtgccgaagatgtgcgggaagcgggactcccccgtctcctccatccactgctgctcggtttccgaatactggaacgggccgaggtttgaggcggtgcggtcgcggcggccgtcgatgttgttgatctcctcatagccgtagggcacgatcatcggcgccacgatgatcgtcaggatcagcacggccagaacgatgatggagccgaccgcaagggggttgcgcatgagcttcttcatgccgtccttaaaaaaggtggtggattcgctcatgacctccttctgccgcttttcatcctcgctggcgagcttgaatttgttcagattgatctggctgctgaacaggttctttttaggcattttatctgtcataatccgttccggcctcctcaatcaaacgaaattctggggtcaatgaccttgtaaacaatatctgtgatcaggttggcgacgaccatcaggacggcgaggaaaatcgtcgtgcccatgatcatcgtgtaatcgcggttcgtaatggcggaaacaaattcctgcccgaggccgccggtggagaagatcgtctccacaaccatcgaacccgtaataatgaaagcgatcatcgggcccacgtatgtaacgaccggaatgagggcgttgcgcagcgcatgcttgaaaatcaccttatagcttggcacgcccttcgcgcgcgcggtgcggatgtagtcctgattcagcgcgtcaagcatactggtctttgtcagacgcgtgatatacgccatcggatacatggcgagcgaaataaccggcaggacatagtttggattcgaggcggtccacgccggcacccagccgagctgaatggagaacacaagcagaagcagcgttgccaaaacaaaactcggggccgaggtcgcaagcgttgagaaaaacacgaccaagcggtcgatgagctttcccctgttcagcgcagcgacagagccgagtaccagtccgaacacgattgcgaccgccgccgcggacaaaccgagcttcgcactgacgttcataccggtcataatcgttgtgaaaacgtcgcgcccggttttcagtcccacgccgaaatccagctccgtaaccagacgccgcatataattgacatactggaccgggacgggctcattgagaccgtagcgctcttccaatgccgcctgaaccgcgggcgacagcgctttttcgctgtcaaacgggccgcccggaacggcgtacattgcaaaaaatgtgatcgcgctgatcaggataaccgtaattatcgcgaggatcgtgcgcttcaccacgtactttgccatgctatcattcctctttctctaagtttggctgctgtgatgcaagccgcagcaggcattcctgcatacatcattttcctgcgcacacatgtcctttttcggcgaacacattttgcatataaaaaaatgccttctgctgagaatcgggtgctttggtgccgccggtcagttcccgttttttgcttccagaattggaagcaaaaaggaaacatccggatgtttcgcacaatttttaggcccaccgctcacgcagaagtgccggacagcttgctacagtcctgtaaatgattgctttattgtaccatgagaaagcctgtttgtcaatttgcaatttttaaaaattgttctttcatcttcctgtttttacaaaatccacgggcattcccgcgcccgtccggtcggcttttcgcagaaaaagcggtgaaacgcaggattttaggcggttttctgggcagcacaggccttctgcacaaaatgttttattctaaaaagcgccgctgcgtcagcgggatgccccaaaaaatattttctccgcatccgcgcgtttttcacggcggtttttctccgcgccacgccggtatacaggaagttccgcacccataggcccggcagcgcagcccattgcgcctcccgcccccaccggctgctctcgctctgcggtccgcctaaaaaccccgttttgccgggcttttcacagcgccggaagctgttttaccatgaccgccgcctccgttttccagccgttccactccagatttgtccgccctgaccggacaaatttgagcttttcccagaacggggctgcattccccggatagccgtccaccacatcgatgcgcacggacgacgcgccctgccgcagcagctcccgctcgaagcaggcgtagcaggccctgccggctccgctgccctgcgcgcccgcttccagcatcagcagcgagagataggcgcacgcgcccggcctgtaatcgagaacgccgatgcacgcgccgcgcgctgaatcctcgatcacgcaggataaaaagcccacccgctccatttccgccatctcgcgcaccacaaaatcccggtcgactgccgtgcggccgaggtgacggcgcagaaattccacatttgagctgtagatctccgcgatccgctccgcgtcctgcggcagcgcccgccggatgctgaagcgctccgcctccctctgcggcattttccaccggcacgatgccattttggagagcaggtcgaaatacgtccaccccgcggcgcgggccgcgagcatcgtcaggctgtcctgattcatgcggtggggccgcacgccggccgtcatgttcggcttcaggttgaaatcgaacatcctgtatacgccgctttcatccgcgcggcagtcgatgcgcaccagtccccgaaggccgaggctgcgcaccgccgcctcgcagctgcgccggatttgccgcagggcagcatcctcccgcaaagcggcgcggctgttctccgccacgggcacctcgccgctgtacggcgcaatcccgctctgatggttgaaccgctcgacgaccggcaggctcgtgccgtccggaaaaacggacactgtgatctctgcgccgctgagaaacggctcggcgatcattttatccccgaaacggccgctttccagtgcatcgcgcagggcgcgctgaaaggcggcgccggaatcacagcgcaccacgccctgactgccgcgcccccggacgggctttaggatacaggggaacggcccgccatacgtgccgcacgcgccgacgagcgactcggggacgaccgggaaccccgccgcccgaagccgcgcgttgacgcggaatttattgtcgtacacggcggcgtcggccggagcctgcccgaccacatacacgccgccgaaccgctcgatcgggtgcccgtcatacagcaccgtgttcagccacagcgtgtccgcgccggctgcgagcgcgcgggcgatccccgcctccgtgtcgggaaacacccagtcgagatcctcgaaaacgtcgggttcttcggccggtacggcaaccggcatcccgttttcacgcaggcagaaggcgatatccgccccgctgtcgcggtagccgcccggcttcatcggttttttgagcccgcccgaaaccggcgcctcgtttttctgatacagcactgcgattttcattgcttttacctcctcaaacgccctgcggctttcttcgggctgaaacgcgcgccctcacaaaagaaagcgcgccgattgcagcgcttcgatctgctctgcggcggacagccccgtgttgtccagcaggcgcccctgattttccggcgcatgctccagcttatcctttaggaacagcgcccgctcgaccagctccgcatccccgcgccggcagagacgccgctcgatgctctctgccgacgctgtgagcacgatgtaatacagccgcgcgccgtgcgcctcggccagccgccgcaccaagggcagctcatcctcgaccacataatcggccaccacatccagccctctgcacagggcttcgtccgccacgccgagcatacaggcccagttgaattgcaggatctccggccaaggcaggcgggcccccgcccgccccttgcggacggacggctccagaaaaccggcgtgaaagtcgtccccgtggatcaaatatatcggccgcgcaccgtcttggtccgccagatgctgcgcgtaagccttcgacagcgtcgtcttgccgctgccacagggccccgagaaaaaataaatgctctgcataccggtctcctccgccgcgccgaaacccgccgagcggatctccgcccaagccccgccgcagaaattcaaaaaaaataaaaaaacagacatcttccgcaatacacaatgtacccgaaagatgtccatctctggtcgaggtgagaggatttgaacctccggcctctacgtcccgaacgtagcgctctaccaaactgagccacacctcgatgacacagccccgcattcggagctgctggcagcggtaccaggatttgaacccagacgaacagagtcagagtctgctgtgctaccattacacaataccgctatatgtcgtgctgttccggtgttttccggacaacgtagactattatagcagatttttcccagaagtcaatcccttttgcaaaaaaagttttaaaaagtattttgtgcggcgcggtgccgcttccagccgcctttcccgcgcggcgaagcgcgccgaaaaccgcccgccgcttacagcgcagcctcctccgcggaaaccggacgcgcgaggaaaaccgcctcacagcgcccctcgagcgcggcctgcgccctgcgagcggcctcgggatcggcgaaaatgccgaacaccgccgagccgctgcccgtcatgcgcgcgttcagcgcgccgccgccgagcatcgcggcccgcagcgcctgcacctgcgggcggcacagcgcatcctcaaaccggttgccgaggcaccgcgctactgccggcaggtcgcggcgctcgagcgcccgcaccatcgcctccgtataccgcgcgccgccgtccggcatccgatcgacaaggctgtacgcctccggcgtactgatgcagaggctcggtttcgcgatcagcagcgtgcagggctccatcggcgcgagcggcaccataatctcgccgatcccgccgcagcgctgcgtgccgttgagcacgcagaagggcacgtccgccccgatgcgcatgccgaggtacagaagctccgccgtgttgagcggctcccggcccagaacgcccgcgcacaggcggttcatcgcgcgcagcacggccgccgcatccgcgctgccgccgccgagtcccgcctgatcgggaacgtgcttttcaatatagatctccgcaccgaacggcagccccgtcacatcgaggaaaagctgcgccgccttgaacgccgtgttgcggccgtcacacgggatgtgcggtttcgagcaggccagattgatccgccccgaatcgttcaaagtgacgcggaccctgtcgcacagcgagacggactgcatcaccatgtccacggtgtggtagccgtcctcccgccggccgacgatgtcgagcgaaaggttgatttttgcgtatgcgctgatttcaatggattgcaaggcgatgcccctcctctacaggttgaaaaccgaaaaacggcggatgtcgatcacgtgcttcgggcacatctcgtggcagcagaagcaccggatgcaccgcgcgtagccgatctgcgccttgccgccgcgcagctcaatcgtgtgctgcgggcagctttcggcgcattttccgcagccgacgcagcttttccgccggatgcgcgggtagggcgtcgcgattttcttggcaagcggccgcagcggctttggcacgcgtgtcagaaaatcgacgtcgctcgagcgcgcgcgcttgaaatccggcacccgcacgctttcaagcgggtcgccgagcagctcgagcggcgtatccgcgcacaggccgcgcgcgcacgcgttttgcagcgtcaaaatctcctcagggcgcatgccgatgacggccgcgccggcgagatccgccgcatacgggctttccgcgccgatcagcgcgccgacaaagcgcttttccccgccggtcgggccgttgccctccatcgcctcgataccgtcgatgaacgaaaaatccgcccggatgtagtcgcacagatcgacgagcatctcggcaaacggctccttttccgggtagcggcagtgcagctcgggcttcatcagccccggcaccgtgccgaacaggtttttaaccgcgcccgagtagcccatcatgccgtgggttttcagcttcgcgatgttgacgacgagcgcctcgcgcggctgcacgaacggctcaagaacggagagcgcgccgcaccgcacgccgcgcggcagctcaaccgtctgcgagcggcattccgtatagagcgaaaagccgtactgctccgccgcagccgtgtacccgcaggcgcggaacacgcttttcatcaccgccgtgttgtacacgccgccgcccgactccgccacgagcacctccgccccacgccttttcaggcacagggcaaccgccgcgacgagcttcgggtgcgtgatgatcgcctcctccggcgcggatttcatcacgaggttcggctttaagatcacctgccggcccggcgcaagccgcgcatagaagccgaacgccgagaaaatgcggtcggcagccttttcgagcgcctccacatcatagccgccctgccggatcagatatgcgcggttcatcgcagtgtttcgaggaacgccgccatccgctcgagcgcctccgtcaggtgcttcaccgaatacgcgtaggagatgcggatgtgcccttcgccgcatgcgccgaacgccgagccgggcacgacggcgacgcgcttgtcgtagatcaggcgctcgcagaattcgttcgacgtcatgccggtggagcaaatcgacggaaacacgtaaaacgccccctccggctcaaagcaggtgaggccgaggcggttcaggccgtccacgatcaggcggcggcgcatgtcgtattcgtcgcgcatctcggcgatgtcgtcgtcgccgttgcgcagcgcctcgatcgacgcatactgcgacatcgtcggcgcgctcataatcgcgtactggtgcagcttcgtcatcggcgcgatcagctccttcggccccaccgcgtagcccatgcgccagccggtcatcgaatacgtcttggaaaagccgttgatgacgaccgtgcgcgcctgcatgccgtcgatcgccgcgatcgagacgtgcggcgtgccgccgtaggtcagctcgctgtaaatctcatcagaaagaacgatcaggtcatgcttcttcacgacctcggcgatcgcctcgagatgctcgcggcgcatgacggcgccggtcgggttgttcgggtacgggaaaatcagcgccttcgtcttttcggtgacggcgctttccagctcctccgcggtcaggcggaattcattttccaccttcgtgctgatggaaaccggcacgccgccaaccatgcgggtcagcgggtcgtagcagacgaagcacggctccgggatgataacctcttcacccggggcgatcaggcagcgcagcgccatatcgatcgcctcgctgccgccgaccgtgacgagcacctcggactcgggctggtacgtgaggccgtatttccgctcgaagaagcggctgatctcctcgcgcagcgccatcaggccgcggttcggcgtgtagcgcgtgcggcccttctcgagcgccgtgatgcccgcctcgcggatgtgccaaggcgtgaggaaatccggctcgccgatggaaagcgagatcacgtcgtccatctcgtttgcaatatcgaaaaagcggcggatgcccgagggcttgatgttccgcgcctgttcactcaggtatctgctgtaatcaatcacaaaggttgctccctctctcgtcaatctcgtcctcggccgccgtaaaatccacgccgccgtccttgtatttcgtcaggacaaaatgcgtcgccgtggaaagcacgccgtcgatcgtcgcgaggcgcttcgcgacaaacatcgcgatttcggacatcgtcgctgccgtgaccatcaccgcgaggtcaaagccgccggacatcaggtaaacgctttcgacctccggcagcgccttgacgcgtgcggcgatcgcatcgaagccggtgtccttcttcggggtgacgcgcagctcgatcagcgcgctggcgcggtggacgtcggtgcgctcccagttgacgagcgcgcggtagcccttgacgacgccatccttctcaaacttgcggatcgccgcctccacggcctcctcgctgagatcgagcatggccgcgagctgctgcacggtcagctttgcgttgtcctgcaaaaggcggaggagcttttccattttcttatccatttcagttacaccctttcttccggtatgtattcgatcggaatctgctgcggccggcggccggcaaaaaccgtgtattccgtatagccgatttcccggagcatatcgagcgcctcgggaatgccccgcgcgacgttctccgggcagtgcgcatccgcgccgagcgtgacgcgccgcccgccgagcgcatggtagcgggagaagatctcgcggtccggcagcaccggtgcatcggtgcacagaaggcgcgaggtgttgaactcgagcgccttgtccgtctcgatcagctttttgaagatccggtcgagctgctgcgcatagcgcgcgaagctcggcctttcgccgggcttgcagacatagcgcagcggataggtgatgtgcgcaagcgtgtcgaactgcccccactcaagcatctcgtacatctcgtcgaaatacgccttaaacaccgcatccagctgcgtttcagagaggttctcccggccgaggtggtagaaatcgcgcatgccggcgatgttgtgcagcgagccgatcacaacgtcgtaatcgcggccggaaagcgcgtcgagcgccgccggcaggttttgcagcggctggccgagctcgatgccctttaaaaaccgcagcttcggaaactgctttttcgtttcctccagctcccgccacgcgcggcgcaccgaatcgaagtatttccttccgccgaattccggcgcgccgtcgtactggtcgcactcgcagtggtcggtcagcgcgtagtacgcgaggccgagcgcctcggcgcgcgcgcacatcgccgccatcggcgcctcgccgtcaaacgagcagttcgaatggctgtggcagtccgccaaaaatttgtaaggcaagcagatcatcccctatccagaacaaagctaaaaactgagaaactaagaaactgaaaaactgtatgctgttttatacagttttatattgtagcacaggtccgcgcgttttggaagtcccgaatttaaattgcgcctgcgcttgacaccgcggcatatttattggataataaagcaaaggcaatgccgcgccgcaggccggccggcagcgcaccaacgtttctcaacgaaagggatgcagaaaaatgaaagcagttgtcaccgtcatcggaaaagatatggtcggtatcctcgcaaaggtttccgcgatctgtgccgacaagggcgcaaacgtcatcgaggtcacgcagtcgatcatgcaggacatgttcgccatgatcatgatgatcgacatcagcggctgtaccgtgccgttcagcgcgctgaacgacgagtttgaagcgctcggaaacagcctcggcctcaagatccacgtcatgcacgaggacgtctttaattccatgcacagaatctgattacttccgaaaggtttggggataccaatgatcgacacacatgacattctggaaacgatcaatatgatcgacaacgagaatctggacgtccgcaccatcacgatgggcatctcgcttctcgattgcatcgattccgacatcgataaggcctgcacaaaggtctacgacaagatctgcggctatgcggagcatctcgtgcagaccggcgaggacatcagccgtgagtacggcattccgatcgtgaacaagcgcatcgccgtcacgccgatcgcgatgctcgccggtgccaaccccgccgcaagcccggtgcatttcgcgaaggcgctcgaccgcgcggcgaaaaccgtgggcgtcaacttcatcggcggctactcggcgctcgtccacaagggcttcgcccccggcgactacgccctgatcgagagcattccggaggcgctcagcgagacggaattcgtctgctcctcggtcaacatcggctccacaaaagccggcatcaacatggacgccgtcaagaaaatgggaaatatcgtcaagcaggcggccgtgcgcaccgcggaccgcgactgcatcggcgcggcaaagctcgtcgttttctgcaacgcgccggaggataacccgttcatggcgggcgctttccacggcgccggcgagccggactgcgtcattaacgtcggcgtttccggcccgggcgtcgtccgcgccgcgatcgcgaaatccgcgccgaccgacgacatcacggcgatcgccgacatcatcaaaaagaccgcgttcaagatcacgcgcatgggccagctcgtcgcgcaggaggcctcgcgccgcctctgcgtgccgttcggcattgtggacctctccctcgcgccgacgcccgcgatcggcgacagcgtcgcggacattctcgaggcgatgggcctcgagcagtgcggcgcgcacggtacgaccgcagccctcgcgctgctcaacgacgcggtgaaaaagggcggcgtcatggcctcctcgcacgtcggcggcctttcgggcgcgttcatccccgtcagcgaggatcagggcatgatcgccgcagcgaagagcggcgcgctctcgatcacgaagctcgaggcgatgaccgccgtctgttccgtcggcctcgacatgatcgtcgtccccggcgacatcacgccggaagtaatctccggcatcatcgcggatgaggcggcgatcggcatggtcaactcgaaaacgacggctgttcgcctgatccccgcgataggcaaaagcgtcggcgacgagctcaatttcggcggcctgctcggcagcggccccgtgatggaggtcaacgcgaaatcgcccgccgtattcgtacagcgcggcggccgtatccccgcgcccctgcagagcctcaagaactgatttttttaaggaatcttctgtaaattgtatgaacgccgtgtgtccggccatactatctccagaacgcaaagtaaaggagataattttatgctggatattatcgcgctcatcctcacgatcatcggcggcatcaactggggcctgatcggcatcttccagttcgatctcgtcgcatggatcttcggcggacaggacgccatcctgagccgcatcatctacacgctggtgggcatcgccgccctctggtgcatctccctgttcttccgggacaacgacctcgtggaccgctgaaaacaggacaaaggccgggagccgctggatttgatccaacggctcccggccttttcttttgcttttcgtatatgccccgcattccgggccgcgcgaaaagcagttcacctttacactgtgcacgacaagctatttacctttacgcggttcgaatgccggcgccgtgcggcaaacacatatacctcaggcgcggatcaccgaccacgcgcgcgtgttgacgttctcgaccttcacgtccgcgccgccgatatagaggccgcagtccgcaggcacctcgagcgccacgcggcccggtgcaaaatcaaacgtctcgcccttgagcgcgagattcttcgacgggacgcgcgtgtaatcgatgttgcgcagttccacctcgcggatgctgccctcggcgccaaaaacgcccattgcgttctcgccgacgcaggtcacgccgtcgatgtgaacgttgcgaatcgcgcagtccgtctcgcggtgcgggttctgctccaccggaatgtggtagtcgtgcttgacagccatcataaagatcggctcgccgttgccccaccagttgcccgcgcggatcgccgtttcaataatcatatttgaaacgcgcacgttctcgaccagcgcgccctcgtcgttgcacatgaagcacaggccgcggttgctctccttgatgatgcagttcgagatcgtcacgttgcggatatggctgtaaatgtagccgatgacgatcgccttcgagcaggagcgcagtacgcagttcgtgatgacgatgtcctcgcagggcttgccccagttcgtgatgccggaaagcgcgatgcagtcgtcgccgctcgagatgttgcagtccgaaatgatcgcgcccttgcagctgcagaagtggatgccgtcgtcgttcggcacgttgcggtccgtatcaattgtaaggccaagcacctttacattctcacactcgttgaagctgagcgtccagcacggtgcgtcgatcacgcggatgccgcgcagcgtgacgttcttcgaattgtggaagaaaatgcactggctcgggcgcgtgccgatcgggtacgtgcactcatcgacctgcgcctgcgtgaacggcacgcggctctctggcacattcttgaccgatgtgtcgtagaacgatttgccggaaaggtcgatcgtaccgctgccgtcgatcgtcacattgtcgtacccgaggttcacgatcatcgcgcgcagcacgccgagctcgttgtgcacgtagtcctgcggcggataatccgcgagattttcggaggccttcagcaccgcaccggcctcgagatgcagcgatacgccgtgcaggttcagtgtgccggtgaggaaaacgccgccgggcacacacaccgtctcgccggttttggccgcggcgtcgatcgccgcctgaatgctttccgtgttgagcgcggcgccgtcgccgactgcgccgaattttgtaatatcaagcatttttgtttccattccttttccttgtttttgctgtgcgctttatggaacaatttatcacggatgcccgccgctgtccatctctcccgcgctaaaagccgcaggggcgcaggagcctgtgtcctgcgtccccgcaattctgtctattaggttctgaatcagccctcggtcgtgcccttcgcgttttcgagcgcgctcgggttcgcctcaaggtaagccgcaaactgggttctgtactcctcgaggtaggtatcgaggccagccgccttcagcttctcgatcgcggcgtcgatgttctcctcatagggaaccatgccgaccttgatcgggtaaatcgaggcgatgatctcggtctggaggttcgtcagctcgctctggacgttcgtcgcgtcgaagataaagccggctgccggcgagatcacgtagttttcggacttgtacgtcgagtaatcgatataatcgtccgtcgagttgtacgcatagttcatgtacggcaggtagcccgtcatccacgtcgtcatgtcgtagatcgcgttgccgtcctcacccttgacctgctccattctgtggtcgccggtcatggtgtagtgcgtgccctcgatgccgtagtggtagaggttgtggttctcctcggaggcatacagccagttgaggaacttgaggccggattccgggtcctctgccgtcgcggagatcgcattcaggttctgcacataggtatagatcatatcgggcgtatcctcggagaagcttctcacccacttaacttcagcgccctccacgccgttctcctgcatcgtgacgccctgattcgggtcgaacgtctgagacgggagcattgcgccgaacttcgcgtcgtcgtacttcttctgggaatctctgttgaggatatccgggtcgatcagaccggcctgatacatctcatagtaggtgtccgcatcctgcttgaactcctcggactcatagaaggaatcgaccgtgccgtcctgacggatcagaacgatgccaaggctgttttccacgtagaacggataggtatcgtagcttctgtgcagccagtgcgccgtatcctgattctggtgcatccagctgtacgccttcgcgccggtttcctccacgatgtaatcctgcgacttcttcatcaggtcgatgatttcctcggtagtttccgggaactcgtcgtagccgaccgcctcggcaacgtcggagcggtaggtcatgtaggacatgacgttgtcaaacgttctccagtagcacggaaccgcgtacttttcgccgttgtagagcgtgccgagccactcggtttcggtgaacttattgtagaggtccggatacttttccatcagctcgtcgatcgagatgatcgcgcccatgccggcgatggaggacaggttcttgacgtcctgcatgacatgcagcagctcgaactcctcgccggtcgtcagcatgaggttcagcttctccgcgtaggcgtcccacgggatgcgcgtcatggaaacctcgatgttcacaccgtcctcgagcagcttttcgttgacagccgcaatgccggtgtcatagtcttcgcacagcgtaccgggctgcacgatgcgcatcggatgaaccgtgccgtcatctgcggtctcgccgtcgtcgccgttatccgcggctgcgctgccggtgctgctgtcagaggccgtgtcctctcccgttccgccgtagcaggcggcgaacgctgtaaccatcagagccagcgcgagaaggagagccaacagcttcttcgttttcttcattgcttacttcactccttgaaatgaatttgtatttgataaatcggcctgcgccgcaaatacctgaattaacccttgaccgcgccgacgaccatacccttgacgaagtatttctgcaggaacggatagaggatgatgatggggcccatcgtgatgacggaggtcgccatcttaaagctctccttcggcgggtttgccgactgcgttgcgccggcggagagcttgctgagcgccgtgatctccgactggatcttgaacagcagcatctgcaggctgtagtaatcctcgtcgttgaccagcatgacggcgttgaagtagttgttccagtagccgatcgcatagaagagcgcgatcgtcgcgagaaccggcaggcagagcgggaagaaaatcgagaacgcgatgcgcacctcgcccgcgccgtcgatcttggccgattcgttgagctctgccgggatgccgcgcacaaaattgcgcacgaggaacatattgaacgggttgaacatcagggacgggacaatcagcgcccagatattgtcgaagcacccgagggacttgcacatcatgtaccacggcacaaggccggccgaaaagaccatcgtcacgtagaaatagagcgagaggccgtccctgtagcggcaggaacggttcgcgagcgtgtagcctgcgccgaacgtgatgaacgaggcgacgatcgtgccgaaaaccgtggaaatgccggtgacgaaatacgcctgcggcactgcggaggacggcagaaagagcatcttgtacgccgccgcagaccattcgctcggccagaaggaatagccgttcagcgtgatcgatttctcactcgagaaggaaacgatgataaccagaataaacggcaggatacacatcaccgcgaacaggaacacgatcagataaataaagaacgtgccgatgctttcgcctgtgctccgcttgattttattgtttggcattgacggccgcgccgccataaccgtgctgttcatagagcaactcctttcctgatcagaacagtgcgccttcggggaacttcttcctgacaatccagttggccataaagaccagaatgaagcccacgatggattgatagagaccgatcgccatggaaaggctcgggtcgcccgtgttcttaaacgtgcggtacacgtatgtgtcaatgacctccgcgatcggcatcagcgagctgttgtcgcggatgatcgcgtacagcatgccgaagtcgccgtagaagatgcggccgaccgacatcagcgtcatgatgcagatggtcggggtcaaaagcgggatcgtgatgtagatgatccgcttgaagcgcgtcgcgccgtcgatgtatgccgcctcgtagaggccctcgtcgatgcccgtaatcgctgcaaggtaaacgatcgtgttgtagcccgtgtttttccaaatgttgaggagcaggaggatcgggtaccagtagctcggcgtcgaatagaagttgatgcgcgaaccgccgcccgccacgatcatgttgttgatgaggcccgtatccgtgccgaggatgccctgcagcatatagctgacgataacccaggaaataaaatacgggaaaagcatcatggactgggaggccttgaggaacttcttcgccttgacctcgttgagcacgatggcaagcagcacggcgcacaccgtgcccaccaagaggaacaggatgttgatgacgagcgtgttgcgcgtaacggtccacgcccagctcgacttaaaaaagtattcgaagtttttgagaccgacaaacgggctcataatgccggttttgtaattgaatttttcaaacgcaatcacaatgtacggcaaagtgaggtacgaaaaaatgaaagtgtacgcgatcgccggcagcgccagaagatacaaaaacttattctgccacagctcccgaagcgggttcacccttttctttccgacatcaaccaacgctgacgccttactcatgtctgcaatcaccctttctgcgagatgcgcgccggcctgtacatcgtgcaagccgcacagatttcagccgcccggggcgctctcaactgttcgtttgtatcataacattttgtgaataatctgtaaactgctctttttcacgttaactccattttttagttttattcagaattttctgggttttttgtaaacttcattttttgcgactttgtgcacaaatttgatttggcgccgatttcgtcctgtttttcgccgtactgccaggcattttctgagttttcggccttgttttttttcgaaaaatagtttattataaattcatacaggttctgacttttatttctgtgcattttttcagcgctgtccgcagacgctgctgccaataatgggaggacgattttttgaaggtaaaatcgacaaataagctcttcaagcgctatctcatcagttttttctgcgtcatttccctgaccatcgcccttgttgtcgtcatcgtgttttccctttactccaatatgcagatcagcgcctcgaaggcgtactcgatcgggcagctcgaacaggtctgcgagatgacgaacctgctctacgagcagatgcgctccgtgagcaaccagatcctgcaaagcgcctcgacgaacagctgcctcgcctccaccagcttcgaccggctgaaggagacctcggcggtcatcaagctgcgcgaaatgcagacggcaaacccctacgtgcggtatgtcagcttctataattccgcctcgaaccgttttgtttccagctcgacggcagatttcctcacggatgcagacatcgaatactattacgacctgctctccgacccgtacggtgacgcctgcacgctgcggctgatcggtgcgaactacgcgacgcagcagatgaaaacgaaatacgtctattcctttatcttcgagctcaaggtgcgcaactccggcgagccggatctcgcggtcatcgacgtggatgagggctatttctcgcaggctatcagcaatctgcgcacgacgaacggctttcagcaggttcttctgctcgaccgggagggccacgtcttttcctccaacaccgtctacgacgatgcgcagagctttacgcagtccacctacatcagccttgacgtcgacgcgcttcctgagctgaccggcacctccggctccttctcccagacgctcggcgacggaacgagtgcgctcgtcacctacgcgcgctccgatacctcgggctttacgattttgaatatcgtcccctattcaaatattttcagcggcctgccgcagattgccgtgctcacgctgctttccggcctcgtcgttttggccgtcggcaccattatttcctaccgcaccagcgcgcgcctctccgcgccgatcgaggtgctctaccgcaactacgtcaaaaagccctcgacagaccgccgcgccggcaacgagcttgaccagctcagccgcgcgttttccgagatgtatgcgaaagccgacaagctcgagcaggggctgatctcctcctattccgactccaaaaagcgcattttgcagcggcttctgcacggcgaatcggcgcagatcccgaaccacctcgaggtataccagaaattcggcatcaacctgctcgccccgtattactgcataatcatggtcaactgcgtgtcgcgcgagaacgcgctcggcccggacgattccaactatttcatttgcagctatgcgctggaaaacatcgtcagcgaggttgccgggcatttcggcagcatttccacctaccgaaactcgaaaaacatgctcgccgtgctgctcccgctgcgccgaaacgagtacccgaagcgcatggataccgagctgcaccggatcgtggacgtgatggccgaagaatttgatatggagacgacgatctgcgtcggcaacatcgtggagacggccgacaacatcaacatgtgctacgaggcgaccaccattgcgctcgaatcctccgccatccgcaatcacggcaaggtgttctttgccgacgaggtttcccagacgatgaacctcaaccagtaccacaacaagctgcacatcaagctcgccgagcacatccgcagcgaggatctcgacgcctgctcgcaggagttcgacctcgcgctctcctatatgaacaacgtgagcttcgtgaccgcgatcacctatttcaaccacgtgatgatgacgctgatggacagcttttcctccaccttctcggatgacgacacgtaccgcctcctgatcgacaagctcaacgagatcaaccgcagcctgccgaatgtctacatgctgcgcttaaagtgcatggagttcatcacgatcctcacccgccacctgagtctgagccgccgctacggcaacgagcaggccgcggagaccgcgcgccagtacatcgacaagaattacgcgaaccccgacctctccctgcggatgcttgccgacatggtcggcctctctcccgcctacttcggcaaaatctttacggcgcacacgacgtattccttcaacgactacctgacgaacacccgcatgaaaaaggccgtgcagcttctcgaggaaacgaagctgccgatcagtcagatcagcgaagccatcggcattttgaatacgaactatttctattccgtctttaagcggaaattcggcatgacaccgctcgcctaccggcgctcaaagtccggcgcggcggccgacacgccggaccacacagcccccacagacgagacctaagcgaaaagagctaccccggcacagaccgaagcagctctttcttcatttatattgttcggtgcggcagcaccgccttttctgccggcggcttttgcgcgaccaagaggaacctgtgggttgcggcctccagcacgcccttggcgtcgagaatccgctgcgcatcatacaggcggccgaggcagcgcccgactgaaaaatccggaaattcccactcgatgatctttgcgaaccagaccagcgcgcccacatcgtagaagcgaatgctggaaaacgcctcctcgccccgcagaagctcaaagccggcgcgtgcaaaccgcgcgcacaccttgtcgagatactgctccggatacggtctttccgtgccgggcaggagcagctccaccaagccgcggtcgttttccgcgccgacctgctgcgtgatgaagatcccgccgggctttaaaatgcggtgcagctctgcagcgtcgaaatcgccgtgtcggttgacgaccatgtcgaacgacgcgtcgccgaacggcagccttgaaacatcgtcggccgcgcggaaatcgacgccgagcggcagcaaaaccgaccggcaaagcgcgatattcggcggatagccctcggttgcgctcgtgttttcaggcgggtggcgcagcgtcaggaggaattccccgccgcccgtatcaatgtccagaaggcgtttagccggccgcagatatgcgcgcacaaccgcctcgtaatcccacggtagatccccatcctcctcgtaccgccccgcgatgtgggaaaaatcccacccatgtatatgcgccgcacgttcctcgcgcagccactgttcctttcgtgtctccaatttttccgctccctttcataatttgatgccattatgaaaccggtgcaggacaggacggccctttttatgcccgatgcaatccgccgtcagatcgtctgcaccggaccgttacctcgaacagcctgcatttttgcatccaccgcctttctgcaatcagtatacaggcttcgccacggtttgtccagcgcattttaccctgtatacgcttccccgcggatgcttcgccgaagcgcctgaccgccccctgcctgccgcaggatgcagaaagggcggaagcacaagcctccgcccttttgtgcgcagccgtttcgagccgcctcggttttatttcgaaattactggagcttttcgaaatccgccgcgccgtgcttgcagagcgggcagatgaaatccgccggcagcgggtcgccctcatagatataaccgcagatcttgcagacatacccagtctttttctccgtgacgaccggcttcggcttgatgtggtcgaagtagaactgataggtgacgcagggcacgtcggaaagcgtgacggcctcggtcacgtcggcgatgaagagcgtgtgcgtgccacagtccacggcctgcagaaccttgccggagatcactgcgcatacggcctctgcaatgtagcgcagcccgttcgccgtgcgcggcgacgacgcatcgccggcaaacttatcggtatccttgccgctcacaaagccgaagcgcttgaacacgtcgaactgcgcttcctcgctgagcagggagatgttaaaaagccccgtgcgcaggatcatatcgtgcgtgaaattatttttattgaccgcgatcgagatgcggttcggcgtatttgtgacctgcatcacggtgttgatgatgcagccgttgtcgcggccgccgtcgcgcgccgtcagcacatagaggccgtacggcaccttgagcagcgcgttaacgtcgatttcgccgccgctcgcggccgtttcggccgcctccgcatgcgttttcggcatatcggcggcaatcgtttcagccagcgcttccagttcctcaaggttctgcgccttaacggcggagcggatcgacacggtcttttcgatgaacgtgacgccgccgcatttttcgagctgcttcctcatcaggtttccgctggtcggcgcccacgagccgttctcaatcagcgcgaccttgcggttcgaaatgttgtgcgcgacgaggtcagagatcagtgcctccatcgtgacgaagatcccggcgttataggtcgtcgaggcaaagaccagatggctccagcggaaagccgccgcgataatctcggaggccggcgtgaccgagacgtcaaacattacggtttccacgccgcggtcgcgcaggcggctggaaaggatctccgccgccatggccgtattgccgtaaaccgacgcatacgcgatcatgacgccgttcttctccggcttgtagctgctccaaagcaggtatttcccgatgaagtcgccgatattgcgccgccagacaaacccgtgcagcgggcagatcatctggatgtcgaggccggaggcctttttcagcagcgtctggacctgcgtgccgtatttgccgacgatattcgtgtaatagcggcgcgcctcgtcgagataatcgcgctcgaaatcgacctcatcggcgaaaatcgcgccgttcagcgcgccgaagctgccgaacgcatcggccgagaaaagaatcttatcggtcatatcgtaagagaccataacctccggccagtgcaccatcggcgccatcacaaacgtgagcttgtggcggccggtttccagcacgtcgccctccgcgacaacatgggcgtaggcgtcaatatcgaaagtgaagaactgcttgatcatgccgacaatctttgtgttgcagacgatctttacctgcggatagcgcgcgacaagctcctgcagcgtggcggagtggtcgggctccatgtggtgcaccacgatataatcaagcgggcggccgttgagctcgtgctcgacgttcccaaagaatacgccgctcacagccttatcgaccgtatcgaacagcacggtcttttcgtccttgagcagatacgagttgtaggaaacgccctgcggcacgctgtagacgccctcaaacatggcgagacggcggtcgttgccgccgacccagacgagatcctcccgaatcttttttgtacaatacattttcattcaccagtccctttctcatgcaggcagaaaactgcggtacagcatttcccggtcctttcgtgcatcgcgggcatttcgccgcagcgtcatttcccgggaaatggaattttctttatttccattataatacaggatcctctaaaaatcaatagtgattcttatttttatgcctacaattatttttccgaaaaaacaggaaattatgcgcatttgagatttttcaattgattttccctctgccttcgcgtataataactttgtatcacaaacggaaaggcggcgttcgcatgcgcatccgaaaaaaagcactcggcgataaaaatctgatcggggcgcgcatcgaagccgcacgccgtacccgcggcatgaagcagaaagaactgcttgcacagctgcaggtgcgcggtgtcgatctcaacgcctccgccctctcaaagctcgaagggcagctgcgcatcgtgaccgacgtcgagctgctcgctttcgcggaaatcctcgacgtggacgtgatgtggctgctcacgggcaaggaataagccctgcttcaagagtacgcgcagcgctctcctttggataaaggaacagaaagcacaaaaaatccggaaaagccgatcggcctttccggattttctattttctcacttctttttcgccttgtgaaccgcccaaaccgtgtagagcggcgccgcaatgcagatcgaggagtaacagccgaccacaacgcccaccatcatcgggagtgcgaaggtcttgaccgtcgtcaggccgtaggccgccgccacaatatagatgacaagcagcgcgaggaacgtcgtcagcgacgtcaggatcgagcgcgtcatcgtctgattgaggctcttgttcacgatgcccggcagcgcgtccacgctcttcgtcggctccagcctgcggttctcacggatacggtcgtaaatgacgatcgtatcgttcagcgagtagccgaggatggtcaggatcacggcgataaaaatatcgttgatcgagaagccgaaaatgacaaacgcaaagaaaacgagcagcacgtcgtgcagcagtgcgataatcgccgtcacgccggccgaaaggccgccgatcttgcggaagcgcagcgcgatgtacacgagcaaaatcacaaacgtaatcaccatgcagacgaggcacttctggaagaagcgcgcgcccatcgtcgggtccacagagctggattccacaacggcaaaggtgcggtccgcatacgcatcggaaagcgtctgcgcgatctcctgctgctcctccagcgaaacggcctcgttgcccgcaaaggacaccgtgacctgatagccctcctcactgaggctctggtttgtcgcaacggaaacattacggcccgtggcctcctgcaccagagacgcgatctcgttggaatcgacgtcgccgtccactgagtagcggatcatcgcgccgcccgcaaactgcaaatcgagcttcgggccgatcacaatcgtacagacaaggccgatcacgagcagggcaatcgaaacggcaaagaaaattttcttgttcttgtaaaaatcgatgttaaactttttcatgccttatccgaacctccaaacagccattttttgcgaagcggcttgaagccggagagagacttgatcatcaggcgcgagaagaaaacgcccataatgaagttgccgatcacgccgaccagcagcgtatagccgaaggaatagatcgcgccggttgtggacgcgccgaaaagctgcgagaggatattcgacgggccgaacacgccgatcagcatcagcgccacgatcatgatcgtgatgttgccgtcgatgatcgaccacaggctgttcgagcagccccgctggatcgcgccgtcgagcgtcttgccggttgcgagctcttccttgatgcggcttgccgtgatgatgttcgaatcgacgcccacgccgatcgaaaggatgatgcccgcaatacccggcagcgtcatcgtgaagctgttcgcaaacgggaaaaagccggaaactgccgcaaaggtgatcgccatctggccgagcagcgtcagcatcgccacaaaacccggcagacggaacacgaggatcatgaaaacgccgatcacgccgaaggcgatcacgcccgccatcatcatagcgtccagcgacttcatgccgatcgtcgggttcaccgtgctgaagttcgaggtctcaagcgcaaacggaagcgcgccgccctgaatcttcgcggcaagctccgaggcactttccgccgtgaagttgccggtgatcgaggccttgccgtccgtgatgaccgcgttgaccgtcgggtaagagatcatgatgtcgtccatccaaattgaaatcgtcttgcccttaaggcgctccgtcgcgtcggcaaacttcttcgtgccctcctccgagagcgtcagggaaatcgcgtaggtgtagctgccggtggtggaatcctgctgcataaccggcaccgcctcggtgacgtcgctgccctccaggatgacgttctccgccgtcgttcccttcggcgtttcataaacgatattgcccgcgtcgtccgtcgtctgggtctcgtactccatgccctcgcggaaggtcagaagcgccgttgcggaaatctcttcaatcgccgcttccgggtcgaagctcgactcgtcgctccgccacgggaagcggacgataatccggtcattcgcctcatcggtatagatctcgtagtccgtgatgctcttggacaccatgcgcagctcgataatcgccttggccgcctcaagctgctccgccgtcgcatcaatgccgtccgccgggctgaaggtcgcctccacgccgccgcgaatgtcgatgccccatcgtatatcgctgacgcccttaatccacgtattcttcgtatcgccgttctgcgtataaacgccgaagatcgccgtatagctgagcacgaggatcaatgccgcgatgataaaaaacacaggtttctttactcgcttcatcttaattatgttcctccagtggataaagccgcgcggcttcatccgttatgtattccgaaagctgttccagcatataaagcagggtggcaagaaccaccctgctattatgtgctatggattactcttccgaaccctgctcgtcgaggagcgcgcggatggagagcgaaacgcgcttcttttcgaaatcgatctcggtgatcttgaccgtgaccgtctcgccgaccttcaggacatcctgcggcttttcgattctcttatcggcgatctgcgaaatgtggatcaggccgtcaatgcccggcaggattctcgcaaatgcgccgaacgtcgtcatgccgacgatcgttgcgtcgcatacggtgccgaccggatactcgtttctgagaatctcccacgggttatcctccgccttcttgtagccgagagaaatcttgccgttttcgcggtcgaggcccttgacatagacctgaaccgtatcgccgacggagacgacctcgctcgggtgcttgatgcggttccaggaaagctcggagatatgaaccatgccgtccacgccgccgagatcgacgaacgcgccgaagttggtgagcgacttcaccgtgccggtgaactcctgaccctcttcaacggtctcccagaacttcgcctgcgcggcctttctctgctcgcggagcacggaacggatggagccgacggcgcgtctgcgctggcggttcacctcgatgatgcggaactgcacctcggtgtccttgaggacctcgagatcgtcgccgcggttggcaacggcctgcgacgccggaataaagacgcggatgccgttgtaaaggacaatcacgccgcccttgacgatctccgtgaccttgccggtgaggatctcctctgcgtccatcgcagcggcaatgtcctcccagcccttgatcgcgtcgatgcgcttcttcgagagcatgatcgtgccttcctgatcgttcgtcttcatgatgagaagatccatctcgtcgccgatcttgacgagatcctcgggcttcgcgcccgggtccgaggagagctcagcagccgggataaagccagcctgctttctgccgacgtcaacatacacttcggtgggagaaatgccaactacaacaccgtgcaccttttcgtctgtatttaagctcttgagtgattcctcaagcatctcctcaaaattaagctcatttgtttcattgatgtctgtcatggtaacaagtacctcctttattatgcttgccggtgtcgatgcgccggcagtgatgccaattctgcgcctgcccgccacaggcagtgcgaagagctcgtccgccgtttcaatgagaaacgtctcgcaggacgccgcgcacacgtcgcgcagcttcgcggtattcgagctttgccggccgccgacgacaagcatcaggtcgctctgcgccgagagcgctctcgcctcctgctgacgattcgcggtcgcattacatattgtatcaaaaacggaagcatttgtacatacctttttgatgaaaaacaaacatttttcccattcttctacgttaaaagtggtctgctggcagaaaaaaacaggaatttttgccagttcggggcgcgcataaaacattttttcgagcgcttcggccgttgtgaacgtgtcaaacggccccctgcagcagccgagaatgccctgcacctcggggtgcccggcgtcgccggccagcagaaggtgccgcccggcagcggaattctcggaaacgaggccgtggattttctgcacaaacgggcaggttgcatccacaaacgggaccgagagcgcccgcagcttttcgggcacggcgggcggcacgccatgggagcggatcaccacggtctcccccgcctgcgcctcttccgggctctcgataatccgcacgccgcgcgccgacaggctctcgacgagctgcgggttgtggatgatcggcccgagcgtgcacacgcgcgcgccctgctttaaaagatcgtatacggtttcgaccgcgcggttcacgccgaagcagaagcccgcggtttcggcgactcggatcatacgcgcttccacctgttctcgataatgtccaggctctccgcgcgcagcgccttaacgcgctcgaacacctcgcgcgaaacgcggcggtacagcatgttcgattcctcggtcagcccgagagaatcaaacgggatcggcttgccgatgttgatgaccatccttttgaacaccttcggcggcatgccgccctcgccgatgatcgcgaccggcacgatcgtgcactgcgtcttatacgcgagcatcgcgatgccggttttcgggttcagcggctcgccggttttggagcgcgtgccctcagggaacatgcagacgacctcctcgtcctccaaaaggcggatcgccgtctgaatcccctcggcgccgcccgtgccgcgcgcgatcggaaacgcgccgagactcttgagaaagccgccgatcagcttgtttttaaagagctccgctttcgccatatagtggagctgccgccccggtatcgcgcagccgaggtaaatcgggtcgccgagcgtcacatggttcgagcagatgagcgtccgcccggaaagcggcatgttttcccggccgacgatgcggtacgggtgcaggatcttaaagaaaaacagcatgacgtattttgcgaggaaataccaccaggaaaggcccctgcttttttttgccacggtgtcagctcctttcgcggacgatctcgagcaggcgctgcacagcgccgtcgaaatccagatcggaggtgtcgagcagaacgctgtccgccgccggcttaagcggcgcggtctcgcggttcatgtcctgctcatcgcgctggcggatctcccgcagcgtctgttcataatcggccggcgtgcccttctgctccaattcgagacagcggcgccgcgcgcgctcctctgcggaggcggtcaggaagatcttgacctgtgcgttcggcaggacgaccgtgccgatgtcgcgcccgtccatgagcacgtcgtaccgctccgccatgccggtctggagggagaacaggaatttccgcacggcgggaatcgccgaaacggccgaggccgccatcgaaacctgcggcgtgcggatctcgtcggtcacatcctcgccgcacagcagcacgtgctggccgtccgccgcgtggcgcaggtcgaccgaaacgcccggaagcgccgcttcaaccgcgccggcatccgcgggctctatccccttgcgcagcatgtgaagcgccaccgtgcggtacagcgcgcccgtatcgacataaatgaagccgagcgcgcgggccgccgccttcgcgacgctgctttttcccgcaccggcggggccgtcaatcgcaattgcaaacatagtgtgattcttcctttttatagatttgatccggccgcatagccggttgaaaaggcgatctgcaaattaaagccgcccgtataggcgtctacgtcgatgatctcgcccgcaaaatagaggccgggcaccagcttcgactgcatggttttcgggtcgatctcccgcacggagacgccgcccgcggtgacgatcgcgccggagagcgggccgaaaccggagatctccacacgaaagcgcctgagcacctcgcggagcgccgcgcgctgctcgcgcgtgaccgcgttgcacttttcctccggcgggattcccgagcgccgcacaataaccgggatcatcttctgcggcagcagctcgccgagcgcgttgcagaaattccggttcttgttcttttcgaggtcgcgcagcagccgctggtcgagctgcgcgtcgtcgagcgccggcttcaagtcaatctccaccgcgtagcgccccggctccatccgccgcatatgcgcgctcgcgctcagaatcgtcgggccggaaagcccgaaatgcgtgaagagcagctcgccgaaatcggtgtagaccggcttctttttgccgcgctcccacaccgccacgccgcagttgcgcagcgaaaggccctgcatggccgggcagtccgggtccggcgattcgagcgcgacgagcgacggccgaagcggctccaccgtgtggccgagcgctttggcgagccgcgcgccgtcgccgttggagccggtgccggggtaggaggcgccgccgcacgcgagcagaacggacggcgcgccgaacacctcgccccggtccgtctcgacgccggcggcagcgccgttttccacgcggaccgcgcggaccgcgccccgcaccaccggcacgccgagctctttgagccgccgggccagcgcgtctgcaatgtcgtgcgcgctgtcggagaccgggaacacgcggttcccgcgctccaccttgagcggcacgccgagcgattcaaagaagcgcatcgtttcttcgggcgggaacgcctgcaccgcgccgtagaggaaacgcccgttgcccggcgcggattcgatcaccgtgcgcggctcgcagttattcgtcacgttgcagcgccccttgcccgtgatgcgcagcttccgcccgagccggtcgtttttttcgacgagcaccacccggcgtccgcgctcggccgccgtgatggccgccagcatgccggccgggccgccgcccacgacggccgcgtcgaaggccctattcgtcatcgcttttattttccaccttttcgtagacgccgtactcgtcccagatattttcgagatcgcagagcgttttcgcaacctcctcctttttcttgatcgccaccgtgacaatcagcgcgttgatcagcgcgagcgggccgacgagcgaatcgacgaacgaaaccatgtcgcttttcgcaagcagcacctgctgcgcgcaggaagccaatggtgaaagcgtgctgtccgtgatcgcgatgacggacgcgccgcggtcggaggcgtagcgcagcgccttggccgccttcttcgaatagcgcgggaagctgatgccgatcagcgcgtcgcccgcgccgatgtgcacgagctgctgcagaatctgcgcgtcgctcgtcgcattgatgagctgcacggcgtcgaataccagagacaggtagtgcgacaggaacgtcgcgagcgccagcgagctgcccgcgccgataatgtacacacgcttcgcgttcacgagcgcatccgccgcactgtaaaacgcctcgtgcgagatcgtctccttcgtgcgccggatgatgtcgatgtcctgctccagcgaggcgtccagaaggcgctcgagcggtgtgttggccgacgtaatctcaagacgctgcacgctcgtcaggcggttgcggatcatctcctgcatcgcctgctgcagcgccggatagcccgaatagccgatctcggttgcaaagcgcacgaccgtggactcgctcacgccgacgaccgcgccgagctttgaggctgtcatgaaggccaccttgtcgtaatgctcctcaatgtatctcgcgatcagccgctgacccttggaaaaagatcgcgcgttctgcttgatccgatccgttagctgaatgttcatgttctgttttccttcctttttggagcggagccccgcagccgcagcgggcgctccggttttgcgcccgtgtatgcacacaaaacgccattatgtttattttagcggatacgcctgcaaaaatcaagcgtgagttgcgctgtttccggagaaaaacgcgcgctttttgcagggaattttctcattgattcattctttgcggaaatccgggcgaattccgccgcgccgcacttgcaaagcggcatcatatattgtataattcacataaatacccgtttgcaccgcgctgctttttgtgcggttggcccgcgggccgacggcgtaaaatcagagaggatcgatttttatggaagcatcgaagcgtatttctgccattcaggagaatatcggcaaggtcatgatcggctcgcagacggtcgtccgcctgcttttgacggcgttcatcgccgacggccacgttttgatcgaggacgtgcccggcatgggcaagaccgtgctcgccaaatcgctcgcgaaatccgtcgaggcaaagttcagccgcatccagttcacgccggatctgctgcccagcgacgtgaccggcctcaattattttaatcagaaggaaaacgaattcattttcagccccggcccggccttctgcaacattctgctcgcggatgagatcaaccgcgcgacgccccgcacgcagtccagcctgctcgagtgcatgggcgagcggcagatcaccgtggacggcaaaacgatgcggctcgaggcgccgtttttcgtcatcgcgacgcagaacccgatcgagacgctcggcacctacccgctgcccgaggcgcagctcgaccggtttctgatgcgcatctcgatggacgcgccggacaaggagcaggaaaaagccattctgctgcgcttcatgaaggatgagccgctcgaaacgctcggcggcgtctgcaccggcgcggacattttagagctgcagcgccttgcgcgcgaaatctacgtacaccctgtattgctcgattacatcgtcgcgctcgtacaggcgacgcgcagctggccgaatgtggagatgggcgtcagcccgcgcggcagcctcgcgctgctccgcgccgtgcgtgcctttgcgctcgtgcgcggcggcgcctatgtcgtgccggaggacatcaaggccgtcgccgtccccgtgctcgcgcaccgtatccagctcagcggctccgccgggctcgtcgccgcgcagcagcaggccgtcgccgatgtgctcgcctccgtcccgctgccgacggaggactggtcaaagtaatgctgatactttttcttctcctcttggccctcggcctcgtctttttcgcacagcggctcctgttccgcaggctctggaacaaaaacctcgacgtgcagctcgagttcgaccgcggataccttttctgcggcgaggacgcgaatctcatcgagaccatcgtcaacaacaaatatctgcccttgcccgtcctcgaggtcggcttcgatatgagccgcgcgctcgccttccgcgaggaggaaaactccacagtcagcgacatgacgtaccgccgcgacatcttcacggcctccgtcaagcagcgcatcacacgcacgctgccgtttcgggcgaaaaagcgcgggtactaccgcatcgcctctacgacaatcacctcgcacgacttcctgatgcaggaaaagctcgtgacgcatatcccgcagaccacggagctctacgtgctccccgcgcggctgcccgccgagcagatccgcatcccctacagcaagatcacgggcatgctcgtcagccggcggcgcgtgtatgacgacccattcgaattcgccggcatccgcgactaccgccgcaccgacccgatgaagcacatcaattggaaagcctcggcacgaaatggcggcctgctcgtcaacctgcacgaatcgacgctgtcgcagaagatcgtcctgctgctcgactgcgaaggcgccggcaccgccgtgaccgacacgctgaatgaaatctcgatctccatcgcggcggcccttgccgcgcgcatgctgcaggacggcatctccgtcacgatccagagcaacggcacggacatcctgaccgacaagccgctttcgaccggcgagctgaccggccgcagcaccgcgctgcacatgcgccggcagctcgcgcgcctcgtctgcaaaaaagacctgccgccggtcgacgatctgctccgcgctgagcgcgcgcacagcggccgcgaaaacaacctgtacgtgctggtttcaaaggcgcagcggcatgcggtgctcgcggcgctcgaatcgctcgccggcggacacgaggccgtctggattctgccggaggacccgaacctgcccgcacaccgcaggatgaccgaaacctcgaagcacgtggatattgtgaggtggagcatatgaccgaacagaaaaagcgcgtcccggcgcgccgcatcgctttcatcgtgctcggctggctgcacgtcgcgctgattttcgcaccgatctacgccggcatcgtgaatttcttcagtccagacttctcgcaggccgacatccttctctgtcacctgcgcggcctgctcctcgtcatcccgatcgcgctctcctggttcgccgggcggtatctgcggaatattgtgatttacctcgtcgcgagcgtctccatcatcgcgctgaccgtcgtgctcttcggcacgaagctgatgatcatcccggcgctgctcctgtgcttcctccgcttttacaaccggctgaccggcgaggcgcaccccctgctcgaccacgcggtgtacctcgtgctcccgctcttcctgctcccggcggcgatcgctttcttttacccggcggtggacggtatttatcaggtgaccgcgccgttctgcgctgccctgtattttctgctttgcttcacacagcgcggcatcgcgcggatcgacggctacatcgagatgaaccgcacaatgcgcaatatgcccgcccgccgcatcgcgcggatttctgcggcgacgctcggcgtcatcctcgtgatcttcgccgcgattctgctgccgccgctgctgctgaatcagaatgatttccgttacaccccgccgcccgccagtgcgggcagcaccgctgcgccgcaggccaccgccgcgccgcagggctccacggagcccgactggatgcagccgctcgattcggagccgaacccgcttctcaagctcgcttttcagatcctcgaatacgtcctgatcgcggcggtcaccgtcgggctgatcttcggcgtcatcttcggcgcgctgcggctcagccgcatgttccggcgttcgttccgcgacacaggcgaccttgtggaaaacctagaaagcgacacttacgagacggtgcgcgagaaaaggcgccggcgcgaccggcccggcctgttcgaccgaacgccgaacgccgccgtgcgccgccgataccgccggacggttctgcgcgccgcgaaggaaccgccgcagccgtggatgtcccccgccgaggcggaggcgcacgccaagctctccggcgacgatgcggaccgcctgcacgcgctctacgaaaaggcgcgctacagccccgagggctgctcgaagcaggacgccgccggcctctaaaatcgggaaatcctccccaaaaaacacaaggcgcccggtacagcttttctgcctgtaccgggcgccgtttttattttaagtatttgccgatcacgggatgcagcctgcggatgtaaaagacgatcaggccgttcatcgagagatcgtacaggatgaaaaccgcattcaccagaagcagcagcaccgggacgaacgcccacccaaacggcagcatctcctccatcgggatgccgagcagccagacggcaagccctgtctccgcgagcgcggccgcgttaaagaccagcagcttcaccacccagcggaggacccgcccgcgaacgcgggagagcagcccgtaaagcaccggatagtagccgaagaacacgatgtagaacagcgccgcttcgcggtccggcacgatgagcgccgaaagcaggctcacagcggcgtagaccgcaaagccgtgccgcacgccgatctccgcaacgactgcgatcagaaaacagccggccaccgccggcagcgcgatcgtcgcgaccgggatgatccccgtcaaaaacagaacgacgacggacagcgcggcaacgacgccgcaaagcgcgattttctgtgtattcctgcgcatggtcacacgcccccggtcagcagcacggaaccagatcgccgcccatgcactcgcagcagcagtcggcgcagatcagcccctgacagacgtcgcacgtgttgcagccgccgacgttcgccgtccccatattggggttatagccgccgtacacgccgctgcgctggttcatcgcctgattcagggccgcctgatactcggggttgcccgggtccatctgacatgcgcgcgtgaagtgctctttcgcctcctccagccagccgcgccgaaacaaaacggtgcccttgaggaaataccactcggcattgcggctctcgaccggcacgccgttcaaaagctgctccgcatccgcgatgcggccggacatgatatagctgcgcacgtcgctgaaacttgaggcgccgctgctgcgcgagccgccggacgtatagccgccgcccgccgtgcggttcttgcgctgcgcgacgatcgtgtcgtacgcctcgttgatctccttcatcttttcgctcgccagctccgcaagcgggctgtctgtatactggtcgggatgatattttttcgcaagctttctgtaggcgtcttttacttcctcgtcgctcgccgaagccgagacgccgagaaccttgtacggatctgtcataccctaaatttcctttccctttcgtgcggtacgctttgtgtgtaaaaacaggatctcccgctggatttccggaaggccctgccgcagtatattttcgagaatgcctgtaaactgccctgtaggcagcaggttgacggccggcgcgaccatcgcgagcgagccgttcagaacggcgttgcactcgagctctgcctcgccgcgctgcgccttgggcagctcgccgccggcatacgccgaaaggccgagcttttcgacgaacgggttgaagctcctgccctgcagatcgtccggaagatcgtccgccgcatccataatatagacccagcggccgagaaaatacccgagctgctcgagaacggccttttcggccgccgtttccccgagctcgccgcagaccgtgcgaagcatttccgcggtcggcgcggcgcaggcgtcgagcgaaacgcgctccgcatgctccgccgcccgctgttcgtccatcattttctgcgcggcttccgccataaacggaaaatcggccgacgcttttttcagggcgcgccggctcagcgcatacagaaagcgcgccccgagcgatttcaccgcgctttcatcctctatgttgtcccggaatttatacgctgtcatgatgacggaaagcgccgccgccttgtgaaagcacgattccgcataggcgtctccgtttttcgggcagacataggtgcattttttaaacgggttgcaggtgcaccgcctgcgctccgcccgcatctgcgcgtcgcgctggttcaaagcgagcagcgcataaaacgtgcagtcatagctgagcgtcatgcgcatcagcgggccgtaatacctgccgagcgcccggcagagctggcagtaaacacccttgtatgcgtcgtattccttgacgagcatttcgcccttgaacggacgcacatatccaaacatcgccgaacgctcctttccgatgtttattgtactcgattcgcaaaaaaatgtgttgaacagattgtaaatattagcgtgaaccgcgcgccgcccggctgatgtcgatcacgcgcgaagcccagtcccggtaaaagtccgcctcgtgcgacacgagcagcactgtgcccggaaacgccgcgagcgccgccccaagcgccgacttggcctgcacgtcgaggtggttcgtcggctcgtccaaaatcaaaaagctgtgcggccgctgtgcaagcaggcagagctttaccttcgcctgctcgccgcccgagagcgtgcccgccggctgcatcgcgtgcttcgccgaaacgccgcactgcgcgaggcagcggcgcacctctttctcggaaagcgacgggtactgcgccgccgcaagctcgagcggcgtgcggacggggtccggccaggcgagctcctgcgcgtagtaccccacagctgcctgtgcggaaaaggaaaagctgccggagagcggcggaagctgcccgacgagcgtcttgagcagcgtggacttcccgacgccgttgaagcccgtgacgacgagcctctccccgccccgcaccgaaaagctgagctgcgacagcaccgggtaatggtagccgaccgagagtccgcgcacggcgagctgctccgtacacggcgccggcagcgcctgaaagcggaagcgcgggcgggcggcgtcctgctccggcgtctcgagccgctccatgcggtcgagctgcttctgccggccccgcgccatttttgacttgatgcccgccctgttcttgcggatgaacgcctccgtctcctcgattttccgctgctgctgcgcgtactgccgcacataatcggcgcgcagcagcgccttcttttttacaaaatccgcgtagctgccgtaatactttgcaatgcgcgcgtggtcgacgtcgcacaccgcgccggagatcctctgcaaaaagccgtagtcgtgcgatacgacgagaaacgcgccgcgcaggccggcgaggtaatccgcaagccacgcgacatgcgcctgatcgagaaagttcgtcggctcgtcgagcagcagcacgtccggttcctcgagcagcagcttcgcgaggatcgccttcgcgcgctgcccgccgctcatctcccccagtgggcgcgaaaggccgaccgccgtcagcccgaggcccgacgcgacctgttcgatccgcgtgtcgatcccgtaaaaatcccgctgctcgagcagcgtttgcagcgccgcggctctttccagacacgcctcatcctgcgcgctccgcgcatagagccggagcatttcgtcctcggccgcgtaaagctcggcaaaggccgaccgcagaaaaccgcgcatcgtcatcgaaggctccgcggcggcgtgctggtcgaggcagccaacgcgcacctgcggctgccagacgacgcggcccgcatccggcacaagctcccccgtgcagatgcggatcagcgtgctttttccggcgccgttcgggccgacgacgccgacatgctcgcccttgttcagtgcaagggcggcgtttcgaaacaggacgtggtcgccaaacgcgtggcacagtcccgtgatttccagtaaactcatgataatcaccattccttattttttgtgccggtcggcgaagccgattgccgctttgctcgttgcggcaaaggcacaaatcgtgtgtaaaaaagtattttcaaactaacctctctcttcaatccaaaacaaaaaagggcagaaagccgataccttcgtatcgcaccctctgcccggcgaacggccgatgaaaaaaacaaaagggctgcggacaaaacactgtccgcagcccggcacattcgaaaattcgtgcaggaaaccaaagcaaaggcgcgtgcgtcccttgccctacggcttcccgatgaaatccaaacgtgtctttaaacgctgagctctgtacaatgtttcatcggatggaattgtacagagcagattctccttttcggcggaagcaccaccatttgcttcacatctcccgtttcattctgcgccttgcggcatgggtttattttagcacggcgccgcggcgctgtcaacggtcttgttccctgcgctttttgtcgcgctcgagcatcatgcggatatactcgcccgtgtaggagccgggcgtttcggccacctgctccggcgtgccctcggcgataaccgtgccgcccttgtcgccgccctcggggccgaggtcgatgatgtggtcggccgtcttgatcaggtcgaggttgtgctcgatcacgatcaccgtgttgccggtatcgacgagcttctgcagcacctcgatcagccggtggacatccgcgatgtgcaggccggtcgtcggctcgtcgaggatatagaccgtcttgcccgtcggcctgcggctcagctcggtcgcgagcttcacgcgctgcgcctcgccgcccgaaagcgtcgtcgccggctggccgatcttgatgtagccgagcccaacatcgtacagcgtgcgcagcttgcgctcgatccgcggcaggtccttgaagaactcgagcccctcctccacagtcatctcgagcacgtcgtaaatgctcttgcccttgtatttgacctcgagcgtctcgcggttatagcgcttgcccttgcacacgtcgcacgccacgtagacgtccggcaggaagtgcatttcgatcttgatgataccgtcgccctgacaggcctcgcagcggccgcccttgatgttgaacgaaaagcgccccggcccgaagccgcgcattttcgactccggcacgttcgcgtacagctcgcggatatcggtgaacacgccggtgtaggtagccgggttcgagcgcggcgtgcggccgatcggcgactggttgatctggatcaccttgtcgaggtgctccatgccgcggatctcgcggtgcgcgcccggcaccgtccgcgcgccgttgagttcgcctgcgagcttcttgtataagatctcgttgatcagcgacgatttgcccgagccggaaacgccggtgacgcagacgaatttgccgagcgggatatcaaccgtcacatttttcaggttgttctgtttcgcaccgacgatcgtgatctttttcccgttgcccgtgcgccgcgcttccggcacagcgatcgtccgcgcgccgctgagatactggcccgtgatcgacttcttgcacttcaaaatcccctgcacgccgccgctgtagatcacatcgccgccgtggatgcccgcgccggggccgatatcaacgatatggtcggcctcgagcatcgtgtcctcgtcgtgctcgacgacgattaccgtgttgccgaggtcgcgcaggcgcttcagcgtggcgagcagcttgtggttgtcgcgctggtgcagaccgatgctcggctcgtcgaggatgtacagcacgcccatcagagacgagccgatgttcgtcgcaaggcggatgcgctggctctcgccgccagaaagcgtcgccgccgcgcgggaaagcgttaggtattcgaggccgacgttgcgcagaaagccgagccgcgagcggatctccttcaaaatcgcctccgcaatcatgcggtcgcggtctgaaagctcgaggttttcgatgaaatcgagcgcatcgacgaccgagagatcacacagctcgctgatattcttgccgccgaccgtcaccgcgaggctttccggtgaaagacgcttgccgtggcaggcgtcgcacggcacggcgctcatatacgattcgatctcctccttaatccacgaggatgaggtgtcgcggaagcggcgctcgaggttgttgatgatgccctcaaactccgtctcatacgtgccgctgccgtactcgctcttgcggcgcacggtgatcttctcgcccttcgtgccgtagagcaggatatcgacgatctccggcggcagctcacggatcggcgtgtcgagcgaaaaatgatagtgctcggcgagcgcgtgcatgtacatcgcggcgatcgtgctgccctccatcgcccagccgccgcccttgaggccgcccttgctgatcgaaagccggtcatccggaatgatcagcgccggatcgatgcgcatgaaaacgccgaggcccgtgcatttcgggcacgcgcccgcgggattattgaacgagaacatgcgcggcgaaagctcctcgatgctgacgccgtgctccggacaggcgtaattctgcgaaaacaggatatcctcgccgtcgatcacgttgacgatcacgacgccgcccgaaaggccggaagccgtctcgagcgaatcggcgaggcgcgagcggatatccgccttgatgacgaggcggtccacaacgatttcgatattgtgcttcttgtttttctcgagcttaatcgtctcggaaagatcgtagatcagaccatccgcgcgcacgcggacaaagccgcccttgcgggccgcctcaaattccttctggtgctcgcccttgcgcccgcgcacgaccggcgcaagcacctgaattttcgtgcgctccggcagcgcgagaacctgatcgacgatctggtcgatcgtctgctggcggatttcccggccgcagaccgggcagtgcggcacgccgatgcgcgcgtacatcaggcgcaggtagtcgtagatctccgtgaccgtgcccacggtcgagcgcgggttcttcgacgtcgttttctggtcgatcgagatcgccggggaaagcccgtcgatgttgtccacatccggcttctccatctggccgaggaacatgcgcgcgtagctcgaaagcgactcgacgtaccgcctctgcccctccgcgtagatcgtatcgaacgcaagcgaggacttgcccgagccggaaaggcccgtcagcacgaccagcttatcgcgcggcagctccacgctgatatttttgaggttgtgctcccgtgcgccggtcacaacgatattttttgaactcatctgaatcaccattccttgtctcggggaaatcggctgccccgcactgctccacaaaaaatttcaaaaagattttaatcggccggctttctgcttgaaacttcgacccatgcggggtaaaagccgctttccagcgcgatattctgcgagtgcaggttggagaggctcgccccgtaaaacggcatttttccgcgcgcttcaatcgccgcgcagagcgcccgcacaagcatcttgcccaaaccgcgcccgcggtattccggcagcacgtcgatgccgacctgccagaaatccgctgtgtccgccgaagcgccggccagcgccgcaatctcatccccatcgcatgccgcagctgcaatcacatccggccggtcgggattcggcgacgcaccgactgcgttcggaaagcgcgcgttcgggtacagcgccgagaccgattccgcgtcaaaccagcgcactgtaaagcccttcggcattacagccttcggaaccgcgccccccggcagaaacatgtgaaaggtctgcgtcagcgtgaagccgtgccggttcagctctgcctcgatgacagctaggttcggccgctcgaacagccagtgcccgcttttcccatcggcaaaacgccgcataaaatcgtgcagaacggggtcggccgtcatcacggcgccgcgtcccgtcgtcgccatctgaaaaaacggcgcctcatgcgtgtaaacgcgccgcttcgggtgcaggcgcggctctgtcagcgtcagcccctcggctgtgaaatccgccggctgggcgttatattccagcgcaagctgtgccagcatatctgcaaagcactttcgcttatcaaacatattatccacccagctccttgatacggtcccgcaaatacgccgcatgctcgaattcgagcagcttcgccgccgccttcatctccttcgtcagcttttcgatcatcaggcgcttttccgccgccgtatacttgtgcttcttcttcgacttgccgtcgtcggccttcgtcgagatctcgagaatctccgaaacgcccttgatgatcgttttcggcacaatgccgtgcgcctcgttgtacttctcctgaatcgcgcggcggcgctccgtctcgcggatcgcgtactccatcgagggcgtgaccgaatcggcgtacatgattaccgcgcccgccgcgttgcgcgccgcgcggccgatcgtctggatcaggctgcgcccgctgcgcaggaagccctctttgtccgcgtcgaggatcgcgacgagcgagacctccgggatgtcgagaccctcgcgcagcaggttgatgccgaccagcacgtcgaattcgccgaggcgcaggtcgcggatgatctccatgcgctccaccgtgtcgatgtcgtggtgcatgtagcgcacgcggatgccgtagttttcgaggaagccggtcagatcctcggccatcttcttcgtcagcgtcgtcacgagcacgcgctccttgcgcgccgtgcgctcgttgatctcggaaatcaggtcgtcgatctgcccgtcggtcggcttcaccgtgatcttcgggtccaaaaggccggttgggcggatgacctgctcgacgaccgccgccgatttttgcagctccatatcgcccggcgtcgcgctcacgaacaccgcctgattgacatgccggtaaaactcatcgaaattcagcgggcggttgtcgtaagccgagggcaggcggaagccgtagtcgatcaggctctccttgcgcgcatggtcgcccgcgtacatcgagcgcacctgcggcagcgtgacgtgcgattcatcgacgaacagcaggaaatcctcggggaagtaattcagcagcgtgcagggctcgctgccgggcgcgcggcccgacatgacgcgcgaataattctcgatgcccttgcacatgccgatctcgccgagcatctcgatgtcgtagcgcgtgcgctgctcgatgcgctgcgcctcaagcagctttccgttttccttaaaataacggacgcggtcctccatttccgcctcgatctcccgcagcgcgcgctgcattttctcgcgcggcacgatgtagtgcgaggccgggtagatcgcgacgtgctttaaatcggagacgatctcgccggtcagcgggatcacctcgctgatccgctcgatctcgtcgccgaaaaactcgacgcgaatcgccctttcgctcgattccgccgggaagatctcgacgacgtcgccgcgcacgcggaatttgtttcggataaagttgacgtcgttgcgctcgtattggatctcaacaagctttttgagcagctcatcgcggcttttttccatgccggggcgcagcgaaatcaccatcgtgcggtagtcgatcgggtcgccgaggctgtagatgcacgacaccgaggccacgatgatgacgtcccgccgctcggaaagcgcgctcgtcgcgctgtggcgcagcttgtcgatctcctcgttgatcgcgctgtccttttcgatatatgtgtccgtctgcgcgatgtacgcctccggctggtagtagtcgtaatatgaaacgaaatactcgaccgcgttgttcgggaaaaactcgcggaactccgagcagagctgtgccgcgagcgtcttgttgtgcgcgagcaccagcgtcggccggttcagctctgcgatgacgttcgccattgtgaaagttttgccgcttccggtcacgccgagcagcgtctgctccttgtgcccgccccgaatcgattcgacgagctcgcggatggcctgcggctggtcgcccgtgggcttatatttcgatatgagctggaaatccggcataaatatcccctttccccgtcctcccgcaggccgtgcgcctgtaggaacaattgtacgttatgcgtctattataacagatcgggtaccgtttgtacagcacaaaatgaacgcctgttcgtctttttttcagattcattgctttgcacaaaaaaggcgcggatttcgcaactgcaagctccgcgcccaaatatttttatgcgtctgaaagctgccgcttctgcatcatcctatcgtgccgctgcttttgcaggatgccgctcgcgcgcatcgaaacgtagtcgtcgtccgtgaagatgaaatgatcagcgaggtttacgctgatgctcgaaagcacctcgtcaatctcccgcgtcgcccggatatccggcgccgacggcgtgcagttgccgctcgggtggttgtgcgcgaggtaaaccgtatcagcgtcatacaggatgcacagccgcagaagctcccgcatatagagcggcacgctgcgcaccgagccctcgttgatcacatccataaatttgaggtaccccttgctgtcgaggatcagcagcacgaggatctcccgcctgcgtccgaaaaacttgctctgcaccgcatgaaacgcgatctgcgtatcggtgatccgctcgcggacctgctgcttcgattcgacgtagacacggaacagatccggaaacgcggagagcagccgcgccgttctcgcgtcaatttcgggcaagccgcgcagaagctcctccggcgcatcgaaaacatccgcgatgcgctcgaaccgcccgagcaggccctcaacggccgcctcagtatccgcgcgcggattcaccgcacgcaggatctgctccagcgcacggcgctccgcagcctcgcgctgcgcatccagccacggcgccgttttccgccggctcccctgtcttttttcatcttccaacgcgtccactcctattctcccccgttcagccgccgatatgcttttcaacaaatgcgcggaccgtgctccagtacagctccggcgcggcctccgcggacccgcagtgcccggcctcggggaccagaaggagctgcttttcacagcgcgccgcgccgtaaaggcgcagggccatcgagcacggcacgaggtcgtccccttcgccgtggatgaacaaaatcgggatacggcactgccgcacctgctcgagcgcgctcatccgccgaaagccgtagcccgtgcgcaggcgcgcgagcagcgaggccaccggcagcaccgggtacggcggcgtgtgatacagcagcggcatcgagaccttgaactgctcccaagccgaggtgtatccgctgtcctcaacgacgagcttcacctgcgccggcagcacctcgccggccgccatcatcacggtcgccgcgcccatcgattcgccgaacagcacgatctgcgcctgatcgtcgcggcgcagaatctcgtagacccactccacgatatcccggcgctccggccagcccatgccgatcgtactgccgtcgctgccgccgtgcgcgcgggcgtccggcagaagaacattgaagcccatatcgtaaaagggctttgcgcggtgcagcatctgctgcccgcagcagccgtagccgtggcagatcaccgcatagcggcggcctgcctgtgggacgaaccacgcgcgcaggcgcatgtcctcgcaattgcggtgcgtgatgtatttcgcatcggaaagccagccttcctgcgccgccgcaccgagcttcggcgcctgcggcgcggccttgcggcgcagcgcgatattcaccatcgcgttcgacaccgccagcagcccgccggccgcggccgcggaagccaaaagaatttttttgcccatatctacaccactttcctcgcaccggacgaaccggctttatttcaggcggacggcgatgaccgtatccatgctgtccggcagatgcacggtattcgacgcctcgacaaagacgacgtccggataattttcaacgatccagttctcgagcggccgaagctccgaaccatcgcagacgagacggatcgactccaccgcctcgcgccggatgccctgcagcgggacgccgccgatcgaattctccatgatgtggtaatacagcgttttgccgctgcgcgtgatgcgcccgttctcgggcttcggcaggtcgcagccgccgcagccgtagatcgattcggaattcttctgcatccagcggccgatctcccggaggatctccaccgattccgccgggatattgccctttgcgtccggaccgacattcaaaagcatattgccgttcttgctcacgcactcgacgagctttttgacgatcatttcggccggcttgaagtttttgtccttcgcgcagtagccccagttgtcgttcatcgtgatgcaggcctcccagcagatgtcgcggccgcggctgtccttgaagccggtctgcgggatgatctgctccgggctgacatagtcgccgctgaactcgagcggctcatcggtcgcgatcgaaccaaagccgctgccgctcacctcaaggcggttgtcgagaataatatccggctgtaaggcgcgcaccatgcggacgagctcggatgcccgccatttttcgccggtcatgtcatcgtaggagaagtcaaaccacatcaggtcgagctttccgtattccgtgcacagctcgcgcacctgaccgtgcatgtattcgaggtagttgtcgaagctgtacggccggtcgcggtacgcctcattgttgcgcatcgggtgctggcggtcgccgaacgccgggtaatccgggtggtgccagtcgagcagcgagtaatagaggccgacgcggatgccctcggcgcggaatgcatcgagaaattcgcgcacaatgtcgcggccgaacggcgtgttcgtcgatttccagtcggtcagcttcgaatcgaacaggcagaagccgtcgtggtgcttggctgtcagcacggcatatttcatgccggcctgctttgcaaggcgcgcccacgcgcgggcgtcgaaatccacggggttgaattcatcgaaaaacggcttgtactgttcctcgggcatttcctccaccgagcgcacccactcgccgcgggccggaatcgcatacagcccccaatggatgaacatgccgaaccggtcgcggcggaaccactgcatccgctcgtcgtattttgcgcggtcaaatttatacattctgatcgatcctttcgcttcaactctcttttttggcgccgctttcggggaaatacaaaaaaagtacgccattctattttaaataattttagcattttaccgaaggtttgtaaataccgaatcgcgcttttcggaaaattcgccgcaaaaaaagccctgccggccgttccgaagaacgatcggcagagctgttttcattcgcatatgcggcaatcagaagttgccgtttgtgagatcctcaacgtagagcgagcgcgggccgttgttcgccggcgctgcggcgggcgccgcaggggccggagcggctgcgggcgcggcgggctccgccttgtgcggattctcgcgccactcgaagaacttcgtcgcaacggacgggaacagcgcataggagagaacgtcctcctcgctcttcgcgcggccgccgagctccgctctgtacttctcgagctccggctcgatcaaatctgccgggcggcaggtgatgaccttgtcgtcgccgatgcacttcttgcggacttcctcgttgaccttgcccggaagctggccgtattcgccgcgcaggatgcccttgctctccttcgtgaccatcttgtagcgctcgccgacgagcacgttcatgacggcctgcgtgccgacgatctggctcgtcggggtgacgagcggcgggtagccgaagtcctcgcgcacgcgcggaacctccgcgagcacgtcgtaatacttgtcctcggcgttcgcctgcttgagctgggaaatcaggtttgagagcatgccgcccggcacctgatacagcagggtgttcgtatcgaccttcagcaccttcgggttgatatcgagcttatcggcgaccgttctgaagtgcgccgcaacctcgctgagcttttcgaggtcgaggccggtgtcgcggctcgtgcccttgagcgtcgcaacgagcgactcggtcgccggctgcgaagtgccgtttgcaagcggggaaagcgcgcagtcgacgatatcgacgccggcctgcgccgccatcaggttcgtcatgtcgccggtgcccgtcgtgttgtgcgtgtgcaggtggatcggcacgctgacgttctgcttgagcttcttgacgagcgagtacgcatcgtacggcagaagcaggttcgccatgtccttgatgcagatcgtgtccgcgcccatcttctcgagctgcatggcgagcttcacaaagtagtcctcgttgtgcacagggctcttcgtatagctgattgccgcctcgaccttgccgccgtactccttgacgtacttcatcgccgcctccatgttgcgggggtcgttcagcgcgtcaaaaatacggacgacgtcgatgccgttctcgatcgactttttgcagaactgctcgacgacgtcgtcggcatagtgcttatagccgagcaagttctggccgcgcagaagcatctgcagcggggttttgggcatcgcctttttcagcgtgcgcaggcgctcccacgggtcctcgttgagaaagcgcatgcagacgtcaaacgtcgcgccgccccagcactcaagcgaccagtaccccatgttgtcgagcttttcgcagaccgggagcatatcctcgatgcgcatgcgcgtggcagcctgagactggtgcgcgtcgcgcaggatggtatccataatcttaaggggatttgtagccataatctatctcttcctttccaaagcgttatcaggcgccgaacagcgcgaggaacacaccggccgcaacagcggagccgatgacgcccgcgacattcgggcccatcgcgtgcatcagcaggaagttgcgcgggttttccttctggccgacaacctgcgagacgcgcgccgccataggaacagcggaaacgccggccgagccgatcagcgggttgatcttatccttgaggaacacgttcatcagctttgcaagcagaacgccgcccgccgtgccgaagccgaacgcgacgataccgagcgcaaggatggagagcgtctggggattgaggaagttttcagccgtagccgtagcaccgacggagatgccgaggaagattgtgacggtgttcatcagctcgttctgggccgtcttgttgaggcgctccacaacgccggattcacgcatcaggttgccgagcatcagcgcgccgaccagagacgccgccgagggcagcatcagggaaacgaagatcgtgacgatgatcgggaacagaatcttctcggtcttggagacctcgcgcaactgcttcatctgaatcatgcgctccttcttcgtggtgagcgccttcatgatcggcggctgaatgaccgggacgagcgccatgtacgaatacgcggcaaccgcgatcgggccgagcagctccggcgcgagcttcgaggtgacgaagatggccgtcgggccgtccgcgccgccgatgatgccgatggagctggcctgctccggcgtgaagccgagcagcgtggcgccgatgtaggtgatgaagatgccgagctgtgcggccgcgccgagcagcaggctcttcgggtttgcgatcagcggggcgaaatcagtcatgcagccgacgccgacaaagatcaggcacggatacacgccgagcttaacgccgagataaagcacgtcgatcaggccgacggcctcggtgccgccgttcgcgagcggaacgccgcttgcaaacatctcccagtgcacgtggccgccctcaaagagcgccgcgtggtacatgccggcgccgggcaggttcgtcaagagcatgccgaacgcgatcggcagaaggagcatcggctcgaacttcttgacgatggcaagatagagaagaacgcaggcgatggcgatcatcacgaggtaaagcggattttcgccgagcatgtagaagcccgtgctcttcagaaagtttgtaatagcttccattaaaaattacactccttttcagtttttaaggcgttcggccgatcagccgatgacgcagaggagtgtgccgctttccacagtcgcgcccttctgaacgcccacgctgaggaccttgccggccttcggcgccatgatctcgttctccatcttcatggcctcaaggatcatcaggatctggccctcggtgaccgtgtcgccgacgttgacgttgacggaaaggatcgtgccgggcatcgggcagttgacagcctcgccctcgccggatgcggcgggagccggtgcggccgccggagcgggcgctgcggcaggcgccggggcagctgcgggcgccggagccgcgccgccggtgatctcttccacggtgacttcgtaagctgtgccgttgacgttgacattatactttttcatttgacttacctctcatctgttgaattcaaaattcagattcttttcaatctcatactcttttgatcgagtggatgcggatatgcgagacatccgtccccatttcctcagcgatcgcgaccgcgatggctgcgacaacctgctgcttgtttccggacacggccggagcagcggccggggctgccgcgggtgcaggtacagccgcctcagcctgctcggccggcgccgcctttaccataatcgcgcccatcagcttgatgatgatgatcagacagaccagcaccacaaacacggtgacgagacccatcagaaccacctgcgcaataccgatttctcccatagattttacctcccttcgccagagtagtatggcaacaaaagttaaaactgtaagtgaatcctgaaaaaaataccatattcccgcattttatcagaatatggttttatcttaccatggattttagaatttcgcaatgcaaaattaaaaaatttttaatttatgaacaaacgcgcggcttcccggcgcttcgccgcatctcaaaaaaactgttgcaaacgcggtaaaaaaatagtaaaatcttcttgtatattttcttatatatattgaaacggggcgaaaacgtgttttccaacaagagtctgcgcaatctgattgttcccctgatcgtcgagcaaatgctcgccgtcacgatcggcatcgccgataccgtgatggtctccacctgcggcgaggccgccgtttcgggcatttctctggtcgattcgatcaaccttctgctgatcaccgtcttttcctcgctcgcgaccggcggcgcagtcatcgccgcgcagtatatcgggcgcggcgaccggaaaaacgccggctctgcggcaaagcagcttttctattccattctcgcgctttcggtcgtgatcgccgttctcgccgtcgccgtgcggcagccggcgctgcggctgatcttcggctccatcgagccggacgtcatggcgaacgcgcaggtctatttcctgctttccgcagtctcctaccccttcctcggcatctataacgccggcgcggcgctgttccgctcgatgggcgattccaaaacctcgatgctgatctcgcttatgatgaacaccgtcaatgtgggcggcaacgcacttctgatctatgtgttcaatatgggcgtggccggcgcggcgaccgcctcgctcttctctcgcatcgcgggcgccgtaatcattacgctcctgctgtgcaatccgcaccgcaccatctgctacgaccggctgcacaagatcgagctgcactggccgatgatcaagcgcattttgcagatcggcgtgccgaacggcctcgaaaacagcattttccagatcggcaagctcctcgtggccagcatcgtggccggcttcggcacggtgtccatcacggcgaacgccgtcgccggaaacctcgcctcgatccagacgatccccggcacggccgtcggcatggcgatgatcaccgtcgtcggccagtgcatcggcgcaaaggactacgacggcgtgaagaaatacacgaagaagctgatgctgctcgcctacctcgccacttgggtgatgaccggcttcatgctgctgttcagccaaagcattctctctttctacgcgctctcgccggaaaccaccgcgctcacgatggaggtgttcatcgtgcacggcgtctgctgcatcctcgtctggccgctggcctttgccctgccgaacgcgctgcgcgccgcgaacgacgtgcgctacacaatgctggtctccctgttttccatgtggattttccgcatcgccttcagctacgtgctcgcggtgcacttcggcctcggcgtcgtcggcatctgggccgccatgtgcatcgactggttctgccgcgcgatcttcttcgtcgtgcgcttcgcacgcggcaaatggaagtcgatcagctacatttaacggcaggcggcgtggaagaatagctgtgtaccgtatggcctttgccgtttcggggcggcaatctgctctttgagcgccttaattcccgaatacaaaggagttgtgattttcatggaatttgacgcattcaccggcggcgtcgcgccgggcgggctgcgctcgaagagcgacatccgcatcctgatctgctacattctcaaaagtgtcggcgcgccgctctccggcgaggacatcatccgcattttgcaggagaaatcgctcgccaactattttgaggcgaacgacgcgctctccgccctcaccgcgctcggcaacatcagccgggacgaaagcgggaactacaggctcgagccgcagggcagcagcgtcgcggagaacctcgacgttcttctcccgctctccgtgcgcgacaaggccatcgccgccgccatggcgatgctggcctccgcaaaggtcgagcgcgaaaacaccgtgacgacggcgcgcaccgaaaacggctacaacgtgacctgccatatctccggcggcgacatggagctgatgaacctgaccgtctacgtgccggatctctatcaggcgcgcgtcgtcaaaaagaattttcaccgggatccgctgcgcgtctacaaccttctgctcgcggcgctgaccggcgacgacgagctgacgaagaacatcctcggctgacgccgcttcacccgcacgccaaatgtttttcggatttcggcgtaccgcggcgttccggccgcgtttcccatacaaatcaaatggccgccctgtgcagatcgcgctgcatagggcggctttccgtttcaaattcccatgcggttccgatacgttttgccgcctacaggtgcagctttttccggatctcccggcgcatggccttgccgttgaaaatcagctggatgaagatgacgatcaggctgaccgccgcgcagatcaccgaagggatcgccatctgcagcacgccggtgaacaggaacacgagcggcaccacgcccatcaccgcgcacacgatcagcaaaatcaggtaatccttgcccggcatgcggaacacgcgcgacaggacgatgaccgcaagcatcgcgccgatgcagacgcagggaaacacgtattcggccgaccacctgtgccagccggtcagcccgtcccagagaaacgcgagcgcagagatcaaaaagcactgccacacgatgctgttcagcagcttcgatttcttgacgataccgacaacggcccacagccacccgcaggcgatgcccagcacggcgaacagcgaccaccacgtctctgaggggacaagcatattcaccgcaacgcagaggatcgccccggtcactgcggcgcttgaaaacacctgaatcagccgcttggtgcggctgccgcccgccggcagcggcgggtagctccgcttttcctccggctcccccgccagattgccgccgcacagcgggcagcggctgtgcacgcccgcaacctttaccttacacggcttgcagtacagcatgcttacatctcctctccgcccgaattgctctgaatctccgcctcgacgcccagcgccgtgagctttcggaagaaattgcgctggatgtcggcctcttcaaagccggagctgaacgcgacggacagcacgtcgccgcaggtgcagatgcacgcctgcagtttggcggtgctggcaaagaccgtcatgtggtggatatacggcagcaccgccgccggcatgccggtcttgccgacgttcgaaagcgtcatggtctcgccggcgtccgaaacgcggcgcgcggcctttaaaaaaaggtttttaagcgaaagcggcacgagcctgatgaacgggttccgctcaagctgcataaagccgctgataatatcgctgaggtgcgcctcggtgagctcctcggcaaaggcgtttttcagcgacgccagtatcgcctcaaagctgtcctcccccgcaccgaagcggtggctgacgtggatgttcccgaaaaagttgcgcacggtatccgaggaaaaatactgccgcaggttgaccggcaccgtgatgacgatcggctttttctctttgtagagctgcatctccccgtggatcgacgtgagcagcagcgcgcagagaaagaccgtgagcgtcgtgccgtgcgccttagcgagcttcagcacggcaccgcaggacatcagcccctccgtcacaaagagcttctccgcgggcgtgccggtcagccggtaggcgccgcccgccggcccgccgcttatgcccctttttcccttccggtagtatttccgaaaactgtcctccgttccggccgagcttgcgatcggcgccgtgtcgtcggcgagctccgccccgaccgcctccggatgcgtctccgccagatagcagcagaccatgtatttgagaaactgcatcacaccggtgccgtccgccagcgcgtgatagatctccagattgatccggttgttgtagtagctgacgtcgagcagcaggtggcggcggttcctgtaaaagagctgcgcgcacgggccggtgttctcctcatggcataccggctgcatgtcgccgggttcgaggtagtaccaaaacagcccgctgcgcaggatatacagaaaatgcgggaatttgagcaacgtcttgtccagcgcgcgctgcaaaacgtccgcctgcacgggttccgtcagcgtgcaggaaaagcgaaatacgcccgtatcccgtctgccgctggtcgccgggaaaattttccccgcattatccagtttaagccaacgactcgacttgtccatctcgctcgctcccgtccaaaaaagaattgatcagctcgtgcgcccgccgcacatgcacgtaccgggggccaaggctcataaagccgtgcagcgcgtcccgcatcctgtacagcacgacgcggttcccggcctcgcgcagcttctcggcgtacgcctcgccctcatcccgcagggggtcaaattccgcggtgatcagcagcgtatccggctggttcgtaaaatcccgcgcgagcagcggcgcgaaatacgggttccgcaggtcgctgtcgtcccgcttgtacaggtcgatgtactcgcagatccggcgggcggtcagcaggtaatcgctgccgttttccgctaccgagggaaacggggaatccgggccgtggtcgctgtaggtcgccgggtaaatcaagatctgccggcggacgtgaaaatcgccggtatcccgcgcccggagcgaaaccgccgccgccaaattcccgccggcgctgtcgccgaccagcgtgatctctccggggtcaaaatcaaagtgcgccggcgcgttgaagagtgcgccggccgcggcgtagcagtcgtccagcccctgcggaaacggactctccggcgcaaggcggtagtcgacggaaatcacgcggcggcccgtcgcgtccgtcagcgccgcgcaaaccttgttgtacgtgtccacgctctccgtcacccagccgccgccgtgaaagaacaggagcgttccgggcttctcctcccccgccggacggtaaatgcgcacgggcacggtcaggccgcccgagcagacgtcgaaatcctgccagcgctgtgcgtcgagcggcgccgccctgaggctttgcagggatctctgcagctggtaggtcttgcggatgtcgatatccgggtaggaaagcgccttcagcgccagcttcataaatttattgattgccatatcggtttcccttcttcacgcacacgcgcatcaaggccggtgttttgtcaattatatcacaaaccggcgcccactacaagtgcggcggccgcgctgtatgcccggcgctgtgctccatctccgaagcagcgccctgcgtacaggatgataagtgaaatatatttaccccatctttcgacatgtttctcgtaaaaaaagagatatactgttgacaggcgctgtgatacggcaatctccgaataccagacgcgtcctgccgtcagcccgtggtgaaacatcatcacttttccgtgcaccccttgtctttccatattataatgtctgagcgttagcaggataaatctccgcgacgcggtacatacttttggaaacgacgtatggaaacgggacggtgagtgagatggaaatggacgcaaagcttctgcttggcatgcggctccggaaatttcgcaaggaaaacggctattcgcagagccatatcgcgaatgttctcggcatcgagcgctccacttacacctattacgaaaccggaaaaaccgtgccggtcattttcgatctgatgcgtctcgctgatctctacgacacctcgatggacgatctgctcggttttcacgccgatcagtccgacccgctcgccttcggcgatccgcgccagcctgtgcggactgccgtccgccgcaaggaacgctatctgagcgaggtcgtgcaggatctctcttccgaggaacgccagcttctcgcattttaccgctctgccaagcccgtagagcgccggcagtttttcgaatcgctgcgcaacggccgccgcaaggagcaccgtcgcaccacagtgtaaaaccaaatatgcgcttgtagcccagttggatagagcgacagactccgactctgtaggccgctggttcgagtccagtcaagcgcgccatgattgggtgacaaaaaagatgtcacccaatttttcttagtattcatgcgggttttcgggcttttggggacaaaatccggcaaacgtttttaccgtagatgtccaaccagtaaaccgcagctgaatccgccacagcggggcttccgcctgatttttcaggttggaagccccgcttttttgcgtttcccacctttttttcccgttgtcggaagtgcaaaagtttccggcagcttcatagatagattgacgaaccctcaaaacgggcgaatcctaagccctcaagatccaagggggtaatgcgcccttttttagagcgccccggctggatggccggggcgttctcttgtaacgactcttcgggacgaagattcgtttccccccctctcccagaccctcacccccggattacttaccagccgggaaagaacaggaaattcctctccgcaagcttaatcctaagtggaatagtcaagaaaaccgtacacccatgagtaaaaccttaagcggcaaacgggcgatcagcgaagcgagcccgtttgaccagcggcgggagattcagttcattggcagtgttgcgccggcggcggttgtagtaggtctcaatccagcgaaatacgatcttgcgaacctcatcccgcttcatggtggagcaattgaaccggtagaccagttccttcttcagcgttgcgaaaaagctctccatgcgcgcgttgtcaaagcagcaatgcgtacggcccatgctctgccggatggaaccgaactccgcaatcgccgcccggtattcctggctggtgtactggctgccgtggtcggagtgcagtatcagacccttttgataaccatagcgtgaaaccgcatcgtgcagggcatcgcagcacaggctggcacgcatatgatgcttcatggagaagccgacgaccgccccatcataacagtccatcacagcggccaggtacagcctgccgtccgcacatttgatctgcgtgatatcgcttaaatatttgacgcctggcttcctggcggtaaaatcccgctgcaccaaatcgtcactctgtgggtcacgatgattgcactttgtcaggccgtgtggacgttttttgcgttgtaacagcccgttttctttgcagagacgataacatttaccgtagctcacgcgaagtgcaggctccacagtctcccgcagcccgcgcacaccgtaacacgggtgttccttcctcgcttttctcagggccgataccaactgtgcatcgaggtctgtccgcatgggccgatgcttccattcgtaatacccttcccgccgcacgccaagcgcctgacaactcagggcgatgctgattccgtcatggtgctcattgatccatgcatacagttcccgcggacgtacaccggttatcgacccgccataaaacccagcgctttacggagtatgtaatttgcctcgtacagttctttgttctcacgaagcaggcgctcgaccgcctgctccgctgtttcgcccggctgcacgccgcgtaattcgccgtgcttcagccgctcttcccgacgccagttatacacggttttggtggataaccccagctgttcacaggctgctctgaccccgatctcatccgacagtttcagcacatcggccttgtattccgcactgtatttttgtcccatttcctgtccatcctttcttcccttaggtgtgcggttttattatatcactccaatagatgatacaatagaagcatggttttgaaggaggatctcattatggcaaagcagcatgacaaacagtttaaactggatgctgtccggtactatcttgattacaaggagctgggtgttcgagggtgtgcccagaatctcggtgtgggttacagcactctgacaaaatggctgaaggatttccgggagtcaggagatatccccgttcgcggctccggtaattacgcctcagatgaacagaaagagatggctcgtttgaaacgggaactccgtggtgcgcaggacgcactcgatgtactaaaaaaagctatcagcattctgggaaaataacagaagccatttacctcgaggtttctgaaaaggtggcagctgccaggaaacagaagcgccgggtttccgtctccggaatgctgaaacattggagtgatataataaaaccgcacacctaagggaagaaaggatggacaggaaatgggacaaaaatacagtgcggaatacaaggccgatgtgctgaaactgtcggatgagatcggggtcagagcagcctgtgaacagctggggttatccaccaaaaccgtgtataactggcgtcgggaagagcggctgaagcacggcgaattacgcggcgtgcagccgggcgaaacagcggagcaggcggtcgagcgcctgcttcgtgagaacaaagaactgtacgaggcaaattacatactccgtaaagcgctgggttttatggcgggtcgataaccggtgtacgtccgcgggaactgtatgcatggatcaatgagcaccatgacggaatcagcatcgccctgagttgtcaggcgcttggcgtgcggcgggaagggtattacgaatggaagcatcggcccatgcggacagacctcgatgcacagttggtatcggccctgagaaaagcgaggaaggaacacccgtgttacggtgtgcgcgggctgcgggagactgtggagcctgcacttcgcgtgagctacggtaaatgttatcgtctctgcaaagaaaacgggctgttacaacgcaaaaaacgtccacacggcctgacaaagtgcaatcatcgtgacccacagagtgacgatttggtgcagcgggattttaccgccaggaagccaggcgtcaaatatttaagcgatatcacgcagatcaaatgtgcggacggcaggctgtacctggccgctgtgatggactgttatgatggggcggtcgtcggcttctccatgaagcatcatatgcgtgccagcctgtgctgcgatgccctgcacgatgcggtttcacgctatggttatcaaaagggtctgatactgcactccgaccacggcagccagtacaccagccaggaataccgggcggcgattgcggagttcggttccatccggcagagcatgggccgtacgcattgctgctttgacaacgcgcgcatggagagctttttcgcaacgctgaagaaggaactggtctaccggttcaattgctccaccatgaagcgggatgaggttcgcaagatcgtatttcgctggattgagacctactacaaccgccgccggcgcaacactgccaatgaactgaatctcccgccgctggtcaaacgggctcgcttcgctgatcgcccgtttgccgcttaaggttttactcatgggtgtacggttttcttgactattccagaaatcctgtggaaattcacccagcctcaaagaaacctccctccatgctgccatactggaagccatccgctccctgattcatggacaacaggaaaaaatggccgcggcactacaggataccttgatacgctgcattgccggagaaaaggaaggaaccaatcctaatatattagaaagcgaaatcaaggaattggaaacagaatttgatcgtctcctgatcctggcagtcgatgaaaacgatattctggactataagctgaagcaactcagcgaaactatacgtaagctaaagcagcagcagaagaaacaactcgagcaaacctcggaacgctccaaggttatggaacgtaaagttaacgaaatcatggaactaattacctcagaagggcttgacctgacagaatactccgacaccctagtgtaccgcatcatcgaaaaagtcaccgtactttccaaagagaaaatccgaatccatttcataggcggatttgagattacacagtcgcttcgttgaaaaatgtgtcgatttatgctataataatattatagaacttgcgtatttctatgagccttatgggataagattgtatttttgctttgcttttgtcaaaatatctagtataatatctgtagaaagaggtgctatcaatgaatgaaaatgtaacaccaggaatccatccaaatgcccgagcggaaattgaagcttcatttttgccgaaagagagtgaaattgcaaaatatttgggaaacgaatggtatataactaatgcagacttaattgaattgggccagagtgaatacaagttctttctaattaagccaactgctacctatgaagaggcattaggcttttcacgagaagtagttgtaattttaagttcatataaaaattttgaaccgcgtaccttggatgcttttgaagaagtgtacaagaaatttcctaacaatcgccttgaacgtatttgttatgtactcataagtgctgatgatgaaatagagagtcatcttgaaaattgtctttctaatcaagaaacccaagtgatagtccctttctcatatagtagtttccacaaaaatcgtggagatacaaacttcttaaggaatcaatttcgaaagtttttctattcgcgtgacttgtttgatttttccgaaccattaaaaaaagacttttactttttcggccgtacagaattgactgttacaatcgttgaaaagcatcgctcaaatcaaaattttggcctttttggattgcgtaaaaccgggaaaacatcaattatttatgatgtaattcgtaagctctcgcaaattgatagtatgggtgtgtttattgactgccaagataccagttttaactttcgtagatggaactcagctttatattatgttttgttgagagcgtatgaagaggcggggatcgaattaaatattcaagaagaacaatttaccgaaacaaatgctgcatatttatttgagaaatctatcagtacactttccaaaaatataggcaaaagggtcttgcttctttttgatgaaatcgaaaatattaccttcgataaatctggcgttcaacattggtgtgatggccttgattttatgtatttttggcagagtgtgcgtagtgcattccaacatacaacaaatgtgtttacattttgcattttgggcaccaatccgagatgtgtagaagaacactttattaaagggaaagaaaatcctattttcaatgcattttcgcctcaatatattcccagatttgatcaagagcgaacccgtgaaatggttcggaaactaggtcgccttatgggcattaagtttgatgaaggcatttatacaagacttgtagaagattacggaggacatccttttttaatccggcaagtatgtagcgctattgcaaagaaatatcctcaaaggcctgttctaattgataggttgaaatataatgctgcacgagaagaatataatcgtggaagtgaatatttcgatatgcttttagatgttctaacacaattctacagcgaagaatacgaaatgctaaatatgcttgcagttggagatttagatacattcaaatttttctcagatcaagactattcgatggtaaagcatctaattggctacggaattattcgagtctccgataatgaatatgattttcagattgatgccgtaaaggattatcttgtgcgtaaacaacatcgtaaagtgcttgttaaaacaccggaagataaatggacatacacttgtacgcaaagaaatgttttagagaaagagctgcggaagatggtaaaagctattttacacatagcttacaaatctgaagcagacgcaaaagcggctgtggttaagaaaatatatggtggagatacaaaaaatactcgaccgtatcttatgctgatctgtttaactctcgaaagtcaaacatttacttgaaaaatctgaaagatttaataaatgctaactgggattatttcaaagattattggaatagccaggaaatgtttatctatgcaatggatatattgaaccacgaaggcagattcgatgcccacgcaactgttccgaatgatgacgagattactatgataaacgcagctctaaccaccattgaaaaaggtatcagcaaatttaaggatgccttctttaaggatgccttcaactgattataagcagttgaaggatatttctgctttccctgcgttttgtgtaattgttcttaagcagttatgtgccacataaagggaatgtcccttctcgagccgattgaatagaggttgaaatttggaactcaaaaatgagacattcaaatttcggcccctgtttttacgctaaaaacctaggatctaagccacctgttcagggttccttcttttatagaaatgagacacccaaaatgaaaaccgaaaaatcgcagtgtaaaataaaattactccaatcggaacccggaattctcacatgattgagaattccttttcttttatccagtattccaactctgcgtctcatattgcagtggagctccgtttgaaactgttgccgcgagaaatttctgtactgctctttctctgattttttattcttcctttgccgtagtgcagacactgcggatacataacttcttcacaagctgagaaccatatatcttgccggcttttcccctttgattttggtgggtaacagtggtcttattcgtaccataaatttgtccgttgtcgtcacaattgtggatctgcgctttcaacgcctttcgtcgccttgctgaagcgtatcgcttttcttgctgtggagaatataatttgcagaaagcgtatgagatggaataattagcagtctaatcgtttttccaatttgcggatatttctttttgccttaggcgccgagaaagattgaaaaatgttcaaaacaatggtaaactgaaagaaaagttcgtccaaacagttatcaggtaactcggtaaaggaattggcatatggacatagaaaaaacgatggttcttattaagggcgaggataaaacaaagtttattacgtccatttcctgtggtccttctccccaaataataattgtggaatataacggcggctcttcttattcatataatgcgaacaacgtgacagttttggtagacccagaaagtgaagatctgaacggaagggtcgcttatgtaaatggaatgcccgtttatgaacctcgactcattcttaactttgaaaaactaagctctgaatttaaattccagaaccgcaacctggaatgccgcagacgaataatatataagaatggcagttccaaaaccgtattgtttcgggaactatcattcttgaaagatatcggctctagtgagagggccagacaaaccttgtcctatttacgcgaaatttcaaagtatacggctgccgatccgactcaagaagcatttttagaacaggaaatgcaacagctgacttttatccaccctgaaagtgtattggggcgatatttgaacggccagccaattgaagatcttacactgcctgtaaatggtatcatttttccgttccgttttaatcttagccaaaaagcggctctggaaaatgcccttacacactctttgtcggtgatcgaagggccgccgggtacgggaaaaacacagaccattttaaacatccttgcaaatcttgtcgccattcaagggaaaagcgtagcagtggtttccaataacaacgaggctgttaagaacgttattgaaaaaatgacaaaaggtgggtatggctttctcacagccttgcttgggaacaaatccaatcaggatgctttttttgccaattcacctgtagccaaagtggcggattgggattgcgatgaaagcgaagatgaactcattcagatcattgaaagcctcaatgtgcgtctggccacgctgctggagatagatagaaaaagagcgcagttgaagcagcaactgcaggcctggcaattggagcacgagcatttcaacgaatactatattcgccagaatgttgctgaagtcgaaaaactccctctattaagagcaaattccgatagaattatttcatttttagctgaaacctctttggccaaggaacaggaatactcagaaaagctgatatataaagtaaaaatgctcatcaaataccgcggttcttttcgaagtctaaagcgtcatgaggcttctgtgttactgcagcttgaacgggcgttttatcaaaagcaaatccaaagaattaaggatgagattgctgaggcggaaagcaaactggaacatgcgtcttttgacaagcttctggaagaacatcaaaactattccgaaaagctgtttcgcaagtgcctgtatcaaagccacagcaaactatcagctggcggttttaccaagaagaattttaaattaagatttcaagagttcatcagagcgtatcctattattctcagcacgacccatgctatacgccattctattccaaaggactatttacttgactatgttatcatagatgaagcatcacaggtagacttaataaccggtgtgctgactttttcctgctgtcgaaacgctattgttgttggcgatataaaacagcttccgcagataaccgatcaaaaaataaaagaggtattaagaagcgctccgcctgcccctgtatacgactattttgatcatagcatcttatcctccataatcagtttgtatggaaaaaccttgccccgtgtagttctccgcgagcattatcgctgtcatcctcaaatcattgagttttgcaatcaaaagtattataacggcgatttgattccttacaccagtccaactttatcgcaaatgccattggtgctgtataagacggtggaaggcaaccatatgcgcaaagttacgcgcgggaaagagaaaggaacatataatcagcgcgagttggatgtaattgtggaagaagtcctgaataacccggacctaacagcagacagcagcaaaataggttttgtaacgccttatcggaagcaagcaaatacagccagccgtcaattgccgaaaggaatcgaaagcgacacagtacataaatatcagggacgtgaaaaagacttgatgatattatctactgtactggacaattcctggatggggcagcgcggtttggaatttgtagacgatccccacatggtaaatgtagcagtgtcccgggcagtaaggcaatttgtgctcgtcacagatcacgatttgtttttcaaaaagggaaagaacattggcgacttgattcggtatatgcaatatagcatacttgacgaaaacattattgaaagtcaagtggtatccgtctttgatctgctgtacaagcagtattcccgaaagcttcttcctctgaaagtaaaaatgaagccaaaagcacgttttcagtcggaagaagcgttacgcgtattgctggaggaaattcttgcacagccggagtataaccgttttagttacgtacagggcatgctgctgcgtaacctattgaactctttggaaaatctcagcgatgaagaaatcacctatatcaataatcgcgcttcactggactttgtcgtattttataagcaggacaaaacttgtaagctggtggtagaggtggatggcttctctttccacgaaaacaggccggagcagcttcgccgtgatgcattgaaagacgccatcctgacaaaatacaacattccatttttgcgacttgcgaccaacggcagcggagagcaggagcggattattcatgccttgctgtaggcgaaaagaggttgagctttggaacacccaaaagcaaaaattagaaaatcacgctgcaagaataaatgcaaatctcttctgaacccagaagtttctctttttcacaggtatcttttttgccaaaataacgcagcccttggagaggtactttaataactactactttattatacaaggaggctgcgtccggtttccgaagactccctgtgtttgtaccggatcagaaaccgcagaaggaagccttagcgtttcttccagccattcaaagttttccgtctcccgtttagcctgcgatataatccgcagaccatgtatgcagaggcaatgaacaagccaccgaacaaccaagagtaaaagaaagcgcagtttactttttcttttcatggcaatttcctttcacaaacaaagcggcggggcggatgtcatttaacacccgcctcgccgccagtggtactatcgcttattatgtttttctttatatctgtgtttgctgcccagcaatgtaatggctacacccataccggaaattcctaaaagagccaaccacaatgccagatttgtttcatcccctgttttgggagtatcgtctgttggcttatccggatcagagggggtttctggaacaggtggtttatcatcgttcgtgatggtgaaggtcatcccctcctgatctaccttcgatgtaaaaccgtccggcacattggcttcggtcactgtccaggcatattggtcgctgagtccggcccaagtatatgtccagccgttctggtcgcttagctcgaccctctggtactctttgccgtctttcagcagaacaaccgttacagtatccgtcgctttgccgccattgtccagcttccagacctttttcacggtaacactaactttgtcatttccgctatcgtccccactcttatgattgttaaacagggcgaccgctgtatcgccagcgggaatactgcctgtttcaccggtggaagtcaccgtatatccggcgttgccgctttctgtcacggtgtagcgaagcccggcaggaagtccgactgccttcttgctctgcccatgttttaaggtaaaagcagcaactccgtcaaggaaagtcatatctccatactggccgtcaatggaggtatctccgagtgtcacagtgaagtggaaatccttgtcggtatctccccgtttgccggaaactgtcttagacacgatcaggctgccggtcttgggatcggggtcaggcttatcatcatttttcatattcacaaaggaagcagccgtcccattctctgtaatcgtaccgcttgcacctgtggaagtagtggtatagccgtcctgatttgcttcctgctcgacaacctcataagtgatatcaatgggcaaaccggtggccgtcttgctttggttgtgcttgagggtgaattgggccacgccgtttgtgaacgtcatcgccccgtatttgccattgacagcggtatccccgagcgtgaccgtaaaattccactccttcgactgattgcccgcatcgccggtgaccgttttggaaacagtcaggcttccggttccgggggttggttccatatcatcccgataaataatgatggtagaaccggtaaacaagcccgatatatttttaccgctcagatcctgatccatcgcactggagttgtaataaggatcgtcaggactgttgtgggcctcccggttctgtgccacgccaatgccgtaccagccctcttcgactaccaagacgggagaggaaccatcatgcgtgccgtaatccaacaaggcggtgtcaagaccgtaatgcaatttcaggtgctctgtcttgtcgtctctcgtccaattggagggttctcctacaatcgggaaaccctgagaatcaaggtctccggtgtatttgtagccgagggcttcgatatcgcgcagcgtaatgtcaacggttccttcggaagcataacgcgccatagtttccaccagtctgccaagccctcttgcaacgctaacattgtcatctatcgttcctgcatcggcgtacaggtagtcgttggtgatgagcacctccgtcaccgtttggttaagctcatagcctgcgggaggattggtctctttgagccacagcttcttttcagaaattatgcccgtcgcttcatcgagatactgcgccagatcgtattgaacctgagaagacaggccgccattcggattcgtcacagcattattaccggtgttcttagccgaaaagctgatgaagccgtccgcatccgtgacgcctttggctaccggtgtcacacaatccgcatcgctgaacagagtgaactcagcgcctgcaaggggctcatctgcttcgttcagcttctgcaccaacaattcacgcattttgtttggaatatgcagttctgagtagaactggcggttaaagttatttaagtccagaagcgtcaagtcatcttgatacgtatctaccaagtcgtcgatgttgccgtttgcagccagctctttcagcttttcgcacttctcttcatcggtctggcagccgtcaaacaaaccattgctcgggttaagcagatagtagcttgtgagtgtattgccgttctcttcatccacgaatacatagttttccacagagcccggcagatcgctcagtatcccctcatagcgctccatctcactgttccagtacaggtgccaatcctcatactcaaaaccgccaaactgatgaagtgctgcctcgagtgccgcccgtctgtatgcctcatcgctggtactgcttacctcaaccgcctgaaaaccgtcaatcgtcgaaccgtataccggaatccagccttctttagcctctgcaccattgtcaatagggttatacatgggaacagcaatgatcagcccgtcccgagcctcctctgtaaggtcattcccctttgaatccagcagcactcccatcatggtgacctgagctttgaagccgcccacagcgccggtttcccattggttttccactttcaaggttgccgtgtcatcattgtaggtcagatggatgtcgcctggcgtcgcatagccgggaagggtctccacctcgcggaggatatacttcttgtccttttcaaagacaaggattcgttccacaccgtctgcgcccacttgggtcaggttcaccattccatcttttccggtggtgagggttgcgatttcctcgccaatgggctgccagtcatcgtccgcttcatagagattaaaggtcacaccctccagaccgctgccatcctgatccaccttttcaagggtactgtaatggggttcctgcaggttgaattccagctccaaattggatgcctgattgccccgttccatgtaaaacatggtaagggtatgcacggtgttgtcggcgaaggtatcgcccttcatttcgttgtcgatgaccgccccggctttttcaaactgctcccggatggtggtttccacccgtgaattccaatcggggtcaatgggatcatcaaaacgatccgtgcggtcgattttgacctcacctgtggagaagtcgatcgtggccgtctcggtatcgtgaataccgccgatatccgccaccagcacgccgtcaatgaagatccatacgtcgtcgtcgccgctgaaccggaaggtcatgggattctccgcgcccatgttggagagcttgccgccagcgggctgctggaaggtgacctccatggtaagacccagatagtggttgaggaacgcatcattggtgccgttggcactgttgggcacaaggataccatcattcacaacaggcataccactctcatcggtctggaacacctgtgccgcctgattgaaggggaagaactggccgttgaccgaatctccgccttgcaccgcccatgaattataaacatcgaaattgccggtctccctgttatacgacgcaaagttttcaagggagctgtacttatagtagcctgttacgggatcgcgcttcaaaaagttctttacatccgtataagcacgcttgccgcccgattccacgtccggatcgaacagataggccagcgactcgtccgccgggcgctcctgcccctgaagagctgtcgtatcgtctgttgtatactgaggaagctgatcgaggttcaaaaccgggtatccgtctgcccccagcgtattctccaccagaccgtagtacggcccacccttaaattccagatagctatcacccaacggattgtttgtattaaagttccagccgccggtcaagttgcccgccggcgagaacaccagcgcatgattttcgttaatacctttattgtaataaccggtcagcttatagccggagccggcaacattgtttttcactatgactttctgcgtctcgcccatgcagctggggatgccgcaggtaggccgggtcttgctgctcgtaccctcattcagatgggtgtgggcggtctcgccgtccacccagtagtcgaacaggttgaaggtcacgttgtccgggttgacagtcttgatgcggtaatcatcgaatacggagttgtcgccccaatcggtgcccacctccacacggatggtgacgatctggctgccgccctcaaaactgatgcttttccagtctttaacaggcaaaacagtgcttccgattttggagaagtccaaggtcatgatgtagcttcccgccggaatgctgccattgttgctctcggcagcttctgtcacctcgctgtaatccagagcgcctttagtattgttgatgtttaagcccgttggcttcttggccggatttccgctgagatcgaccacctcggcggagaaaacaattttgccgagattggctacaaaatcctcctcatatttcagcggcgtatcctcggtcacgcccggataggagatggtgtactcggcgtcgctctgccttgtgatattgatccgtccgttaccctccagctttgcagagtcttccacgatgatacggtcgatgccgttgacttccatcacaaaatacgccaaagcattcagcttatccatgtcaagctgtgccgcgtcggtttcatccaaagctgcgatggccgtatagatggcctcgatctgcgcgaatacctccgcctttgcggtttcgtccatagcttccagttcttcctctgtgggaagcgcatcgatcagggcctgtacctcttttatgttgcctttgcacagcgtcaggtctgcgccgtctgcaccgcacaccgggcagtcagtattgacggcatcctctgtgcaaagcgtttcgcaggtacactccggcccggcggggtcgccactactttgagaattgcagatttcacacacataggtgcagggcgttcccgcagcagatggggaataaccacagttttcgtcatgctgatgctggcagggagatccttccaccgccggggaatacacacagccttcttggtggtcgatattcccgtccgcatcggtgtcggtgcagttcatgttgcagggaatctccgccactgctgccacatagccgcaggcatcgcagtgggtgtggctgcacggtgtcccctcgctgccctcggtatagccgcactccgcggtatgcgtctggtgatggagacacaaagaacccgccgcgttttctgcatgtgcagaaataggcattgttcccgaaatcagcaacaccacagaaaataatacagaaagcgcttttttatatgctcgcttatttttcatcactgcctgtcctcctcttcgagatttttaagatattctgatgcctcctcgacctttgaaaaggtgagggcttttctggtaatatatgacgccgcatcattccgctcccgtatggtaaattgccgaacgtccaaattattaagcgcatttttaatggaatgaaatttcgtgcattctctcaaatcagagacaaatgcacagtctgtttgaatgcgcaaatcttctaatagttccataatgcctcctatgctttgagccgttgtttcaacccgctgttttctcgaagaatcactttgtatctgctattcttgggtgttcgtggagagttttcagtcagatgattggttctcagtttaacactgaacgtaccagaattttcaccaagattgacttcatggcctgctgataagttcatttgctacgtcctccagaaattgtgcgatgatgctttctaccacaatttctgcatatcccgtcaccttactgcaatgttccgctaattctctccatgaatgatcctcctttccctaacgaaaaaagcagccagcgtttcaccgccggttgcaagcaatacaattccacactctgcaccggctgccaacaagaaatcgcaagatccatgtttcctgcgtcaccagctttcgctggttttgctaagcacgaaatatcagactttttcgttcggctgtgttataatagacaagaaatgtatttgcgtcaaagggtataaaaattcgttgcagatttcgtgaaaaaagcacatgtttccgggtcggaattttcttgctgggtaagaacgatatttcctactttttccagcatacaaagaccaatatttcctacattatccaagtgaatatttttcgttattcaccatgcacccagcgcaagaaagtgtcctgcgcgatagatagctgccgggccaaagctttttcagtaacttccggtattgtggccagttaaaatctttcccgctgaacttatccatatagatgtttttctccaaaacagcgaaatcccgcaagacaagaagccgccgatcctcattctgttctttggctggtacgcggacatagctgtaaatgttgcctttcataataaaggcctccctctgagggcttcgctagataccactacacagacgaatttgaagaatacaaggaatcgagccttgccactatgtctggacagagaatggatccgacgccccctgcaaggcagaaatctgtaaatctttcgcctatgatatgcagacctatatcgacggttctacgtataatgagatgagcaaatttacctttgacgacgagaaacgcggtcatggatactattgccaagcaaaccgtgatagtgaggcacaaggccccaaaatagaaaaagcgccagccgcaagaaaaacggctggcgctaaattgttcagtatggcatacttccggcgaggatatcttttagcgtttcccctgctatggcaggtatgaaaattttttcacgagtatacgggatttgagcttagaaccaagcatgatgaaaagagctgaaatgcccgcagaataagactttttcaggcaaggcagaaaaacacccctccaaatcggaggacttatcatgtattaaacttcgttcctttagacaccgcctttcaaaacaaagtattgattttcaggggatatgcggttatactattgatatatacatggagtgactgcctatcatccgcgccaacagatgtgttacgggcggtcatttctttttgtttattcattctgttcctctcctttcaagccaccaagaatgacggaaatcagttcaatgacattgagcagttcctcatctgcatcgtttcccgcttcaatccgttgcagttccgcaaggacggcggcaagctcctgtttcagagcctcatacaccctcggattgccctgcacgaccacatcctgattcagacagcggcggtaacagtattcctgcttcggcaatcccgataaggaaaccgccttgttaatgcgctcgttttcttcgggcgatacccgaaaacccaccgtgatattcctccaacggtttttgttgtctctgttcttagctgtcattttcaaaatctcctttccctaaatcgtccaatttctccgccatttccatctgtttggacgggaacagatgagcgtactgataggcgatctcaatatgctctcgtgtcccacacggccagcaatcgccaccgctgaggatcccatatcaatcagcagacttatgtggctgtgcccttacggtataattacgacaaaccggaaaagccccgtagaatcaagggttttgaggttttcagtctggttttttcatccttttccaaaccgaaaaatcatactgaaataagtcgaattataggaggtgtttcattaacgacaaatgaatagcagaaaggaactcaaagccttttgatttcaaacacagtagaatattggatttatgcgaagccgtcacttgtttcaagtggcggcttttgtcatttccaggactgctgtgcaggcacatgacaacaccaatcagaaacgaggtgattgttatgaacacgcaaatcatcgccatcgccaaccagaaaggcggcgtcggcaagacaacgacctgtgaaaacctgggtgttggattggcgcaggccgggaagaaagtgctgctgattgacggggacccacaaggcagcctgactatcagcctgggccacccccagccggacaagctgccctttaccctgtccgacgcgatgggccgtatcctgatggacgagccgttgcgccccggtgagggtatcctgcaccacccggaaggcgttgacctgatgcccgccgacatccagctctccggcatggaggtctctctggtgaatgccatgagccgtgagaccatccttcggcagtatctggacacgctgaagggacagtattcccatatcctgattgactgccagccatccctgggtatgcttacggtcaacgctctggcagccgccaacaggatcatcatccccgtccaggcggagtatttgcccgccaagggcctggaacagctgctctccacggtaagtaaggtaaagcggcaaatcaaccccaagctccaaatcgacggcatcctgctgacaatggtggacaaccgcaccaactttgctaaggaaatcgccgccctgctgcgagagacctacggcagcaaaatcaaggtgttcggcaccgagattccccattccgtccgggcaaaggaaatcagtgccgagggcaagagtatctttgcccatgaccccaatggcaaggtggccgagaggtacaaaagtctgacgaaggaggtattgaagcttgaaaagcagcgcgaaaaaagtagagctggctccatacgatgacttgttttccaccgaagaaagccgccaggatgccaagctggaaaaagtacgggaaatcccgctgtctgagctgcatcctttcaagaaccatcccttcaaagtcaaggatgacgaggctatgctggagaccgccgacagtgtgcggcagtacggtattctggttccggcgattgcccggccggacccggagggcggatatgagctggtagccggacacaggcggcacagggccagtgaactggctgagaaagaaaccatgcctgtcattgtccgagacctggacgatgatgccgccaccatcatcatggtggacagcaacttacagcgggaaagtctgctccccagcgagcgagcctttgcctacaaaatgaagctggaggcaatgaagcatcaaggtgcgcgtggcgatttaacttcgtcccaagttgggacgaagttgcgggcagatgaattgttggcgcagcaggccggttcgagtaggaaccaggtgcaacgctatatccgtctgacagagctgatccctgaactgctggatatggtcgatgaacgaaaaatcgctctcaacccggcttatgagctgtcctttctcaaaaaagaggaacagcgggacttgctggacgcgatggacagcgaacagtctaccccttctctctcccaggcacagcggctcaaaaaatacagccaggaagggcatctgaccctcgatatgatgcgcgtcatcatgggcgaagaaaagaaaagcgatctggaccgggtaactttcacatccgacaccctgcggaagtattttcccaagagctacacgccccagcggatgcaggaaaccattatcaaactgttggaggcgtggcagaagaagcgccagagagagcaggaacgatgaaaggagccgcctatgagggatatttcagcccgtgagctgaaaggacacaacattctcgccgtggagcgttttcaggacaacacccgctggatgatcgagttttctgttcagcgtccctgttcctacggcagccccggcgatgaaatgcggctgtttctcacggaggacgggtatcaggccgctcttcacagccagaagcgccgggaaatcaaaattaagcggtatgcccgtatcattgagggccatgtcctcgacttcaagccggacaagcgccgtcgccacccgtaaccccatcatcactacgaaaggaaaggaatgaatatgtgtactgtccagagcatcaaagatgccatccgggaaaactgtcagtcccagcatgatatggaatccaccgacattgaccaggttttgcaggccctcccgttttcggagcatgattcgccgttcagtcagccgccgaagcataagcgtccctaccggccctggcagaacaacaaaaacagctgaagccacagtctttttacgaaagattgtggcttttttcatgccctgaaacaagaaaggagtgaggtcaatggccgtatttcgcattgagcgaaccagagattataccgttatgagcaaccatcacctgcgaaacgaaaaattgtccctcaaggccaagggactgctttccatgatgctgtccttgccggaggattggaactataccaccagaggacttgcgaaaatctgcaaggagggcgtggacgccatcggcggtgcgctgcgcgagctggaaactgccgggtacattgtccgccatcagatgagggaccggcagggccggatcagcgacaccgagtatgtcatctacgagcagccacagccgaagaacccggatacgccccagccggatacggattcaccagatacggaaaacccgtatctggagaaaccggatacggaaaagcccgcagaattaaatatagacaaatcaaatactcaaaaatcaattactcatagatcaagtaccgattccattcccttccgggaaacagcggcggcaagaccgccggaacggaaaggaagggatgcgatgcctgtctcagagatagaaaattatcgggatttgattctggagaacatcgagtatgactatctgtgtcgagagtttaacacctatcgggaggacctggacgagattgtggagctgatggtggagaccgtctgcgccaaacggaaaaccacccggattgctggcagcgactttccacatgagatcgtgcgctcccggtttttgaagctgaccagtgaacatatccggtttgtcatggactgtatgcagaaaaacaccaccgaggtccgcaacatgaagcaatacctgctgaccgtcttgttcaatgcgcccaccaccatcagcaattattacaccgcacaagtgaatcacgatatgaacgcaggcggctggtaagagccgccttttctcatgccaaaggaggaacaacatgaaccagatggaaatttttaagaacccggagtttggagccatccgcgccgtagagattgatggcgaaccctggctggtgggcaaggacgtatccctggcgctggggtacaccaatccgcagaaagcgattcgggaccatgtggatgcagaagatcggacggtgaacgattcgttcaccgtcaacggaaccgccatcacgctcatcaacgagagcggcctctattccctggtgctgtccagtaagctccccaaagcaaagcagtttcgccggtgggtcacgtctgaggtgctgcccaccatccgcaagcacggagcttacatgaccagggaaaagctgtgggaagtggccacttccccggaggcgctgctgaagctctgctccgaactgttggctgagcgtgaagaaaatgcggtgctgcgggaggaaaacgctctgttggaaggcaaggccgccttttttgacctgttcatcgacatgaagcagagcaccaatctccgcaccaccgccaaagagctggttgtgccggagcgccgttttgtccggttcctgctggaacagcggtttgtctatcgcacggcatccgggaatgtacttccctatgcaaagccctccaacgacggcctgttctgtgtcaaagactactgcaaccacggacacatcggctcctacacgctggtaacgccccagggcaagctatattttgctcagctgcgtgacagcatcctgctgatgatatgatgacccgttatcttttgcggcggctggtggtcccgccttagtatcaagcaccaccccctgctaaatcccacaaaaggaggcgataacaatgcaggaagaagtggaaaacaggactttgacgctggtagtcagcggttccaagttcaccggacggctgctgaaagctgctattaccaagtaccttgctcaccgcaaggaaaagaagctgcaaaagcagaaaagccgggatgctcccgtgattccccacggcaagcagacggtgaaacagctgattggtcagaaccagggcgtgtccaacatcgagatcaccgacccctccatcaaggagtttgagaagattgcccggaagtatggtgtggactatgcagtgaagaaagaccgcagcagctccccgcccaagtacctgatctttttcaaggggcgggatgcggatgccctgacctcagcctttactgagtacaccaacaaaaaaattaagaaggtgcagaaagcgcagaacaccgagcgcccgtccgtgctggaaaagctcaatcagttcaaagaactggtcaaaaatgccgtggtggatcgcatcaagcgaaaggagctggaacgatgaagaagcagcttgacatcaaaaagctccttttgctgaatatgccctacatcctgatggggctgttcgccaccaactttggagaagcatggcggatggccgtgggtgcagatgcttcggcaaaaatgctctcgttcttctccacgctgccggtggcgctggccagctggtggcccagcctgcacccgctcgacctggtggtgggcttgtgctgcggcggtggcctgcggcttgctgtctatctcaaaagcaagaacgccaagaagtaccggcatggcatggagtacggctccgcccgctggggaacccatgaggatattgcaccctacattgacccggtgttccagaacaatgtgattctgaccaaaaccgagagcctgaccatgaacagtcgccccaaggaccccaagacggcgcgaaacaaaaatgtactggtaattggcggctccggttccggaaaaacccggttctggctgaaaccgaacctgatgcagatgcactcgtcctatgtggtaacagaccccaagggcaccatcctggtggagtgcggtaaaatgctccagcgcggcacacccaaactgggcaaggacggcaagcccatgaaggataagcacggcaaggtcatctatgagccgtaccggattaaggtcctcaataccataaacttcaagaagtccatgcactacaatccctttgcctacatccactccgaaaaggacatcttgaagctggtcacgacgctgattgccaacaccaagggcgagggcaaggccggggacgatttctgggtcaaagccgagacacttttgtactgcgccctcatcgggtatatccactatgaggcaccggtggaggaacaaaacttctccaccctcatcgagttcatcaacgccatggaggtacgggaggatgacgaggagttcaaaaaccccgtggatctgatgtttgacgcattggaagcggaaaagccaaaccactttgccgtccggcagtataaaaaatacaagctggcagcgggcaaaacggcaaaatccatcctgatctcctgcggtgcgcgccttgccgtattcgacattgcggagctgcgggaggtcacttcctacgacgagttggaactggataccctgggagatcgccggactgcattattcctcattatgagcgatacggatgatagctttaacttcttgatctccatgtgctacacccagcttttcaatttgctctgcgaaaaggctgacgatgtgtatggcggtcggctgccggtccatgtgcgctgccttattgacgagtgtgccaacatcggtcagataccccggctggaaaagctggttgctaccattcgaagccgtgagatttctgcctgtctggtcttgcaggcacaatcccagctcaaagccatctacaaggacaatgccgataccatcatcggcaacatggatacctctatcttccttggcggcaaggaaccgactacgctcaaggagttggccgccgtgctgggcaaggagaccattgacaccgtgcgcccagatagggcgttgagcaaagtagtgtaaggcactaccccgtaagataacacgggaaacaacctgcctaaccgaaaggcgaaagctgaaacgggaacacagcacggcaggaaagcagtaagtcacctaaagataacttggtgcgactgaactgcaatgttaagtggatatgaggcttaagttgggtttactgaacgcaagtttctaatttctgttatcggtcaggcggaggaaagtatctgtaacctctggcacactggcgattggttataggtgtcaatcaatcggttatcaaaaacggtgtgcaatctgtaggagaacctatggcaaggaaacgaaagcggagaccgacaatccacatttgcctatgctcaacgctaactggggatgccctaaacaggaacgccaaccgaaggaggtgaaaattcggctatggctgtagagcctgaaaatcctgcatgggcacggaacgcccgtagtagtccgagaggggtaatgaccctcacatggcgaaggggcgtagttattgtgtactaaaagaaaagttgattagggaggaaaacctcaaaatgcaaccaacaaccgaaattttagcaagaatcagtagaaactcactcgcaaataaagatgaaatttttaccagactgcatcgctatatgctgaggccagacctgtattttctggcatataaaaatctgtatgccaacagtggtgccgcaactaagggtgcaaacgatgacacggcagatggattcagcgaagccaaaatcgcaaatatcatccaaaggctcgctgatgaaacctaccagcccacacccgccagaagaacctatatccagaagaagaacaatcccaagaaaaagcgacctctgggaatcccgacattcacagataagctggtacaggaagttctgcggatggttctcgaagcggtgtatgagcctgttttcttgccagtttctcatggattcagacccaaaaggagctgccataccgcactgaaatccttaaaaatggagttcaatggtatgcgttggttcgtggagggtgacatcaaagggtgctttgacaatatcgaccacagcgttcttgtaggcttgattcatagtaaaatcaaggatgcccggttgataaagctgatttacaaatttctaaaggctggatatttggaggattggaaatatcacaaaacttacagtggtactccacagggcggtatcatttctccgctccttgctaacatctatctgcatgagctggacaaatttgtaatgaagctgaaaagcgaatttgatacccatgggcaagaacctgtcaggacagaatatcgcctcctaagcaatgacctccagaaactttcctatcacatcggcagacgcaccggggcagaaagagaacaactgctttccgaatacaacgaaaagcggaagctcatgctgaaaatgccctgtacagctcagacaaaaaagtgcatcaagtatatccgctatgcggatgactttattctcggtgtgaaaggaagtcaagaggactgccagtggataaagagtaaactttctgagtttatccgtgaaaccttaaagatggaactcagcgaagaaaaaacactcatcactcatagcagcaaaagggcaagatttttggggtatgatgttcgtgttcgcagaagcagcattatcaagcatggtgggccaggcaaaaagacaaaacgcaccctcaacaattcctgtgaactgtctatcccattcgatgataagattcacagcttcattttcgccaaggaaattgcgatacagaaaccggatgggaaactcatgcctgtccgccgtaaatctcttttgcgactcacagatttggaaatcgtttctgcctacaatgcggaactgcggggaatctgcaactactatggaattgccagcaatttttataaactgtgctacttttcctatctcatggaatacagttgcctcaaaaccctcgcaagtaagcataaatgcaccatagccaaggtggttgagaaattcaaagaccactacggagaatggggaatcccctacgaaaccaaaacggggcaaaaacgatgctattttgcaaaatactccgattgcaaggataaggccaatccgacggacatcgtatgcaatgctgcggtggagtacggatattcccgaacagccttggagcagagattgaaagcaaaggtctgtgagctatgcggtacgaccgagagcgattgttacgaagttcaccatgtcaacaagctcaaaaaccttaagggcaagcaggcatgggaggttgcaatgattgcaaaacggcgtaaaacgctggttgtgtgcaaaaaatgccatgttgcaatccacaaccagtgagtaactgctgaccgaacgataacagagccggatacattgagagatgtaagtccggttcccggagagggtggtgcgaacctaccatagtaatatggcaaggcggtgcctccctactccactacaataccggcgagagccgtgggcgggaaacttcccactcgctcaactatcaaaaattggggaaagagctgatgagtcaggacgagctggccgtcatggacggtggcaagtgcatcctccagctgcgcggtgtgcggcctttcctttcggataagtacgacatcaccaagcaccccaatttcaaatacacagccgacgcggacgaaaagaacgcttttgacattgaagcgttcctgtccacccggctgaaactcaagcccaatgaggtctacgatgtgtacgaagtagacgcagagggcgcgtaaatctgttccgctgtgaaaggagtgatcgtatctattcgccgcaactgcccttatggggccattggcgtacaaagcggacaatcaccaaaaaataataaaaaaaggaggacagccggaatcggcccccggaaaccgggcggcagattgctccggcttttgtatgcctatgaatgactaaaacaacctttttcaaatgattccggctaactataatttatggcatttttcaatcaggctatcaccgttcttcagaccctcgttattgctctgggcgctggtctcggcatctggggtgtcatcaacctgctggaaggttacggcaatgataatccgggcgcaaatgctcatgtacggtaaggaagcaagcaaccgaaaacaagagatagaccgccagcactacactattccgaaccaaagaccaaaagataagcattgtgggaaaatctaaacttttggattttcctacaatgccaactacggcggaatccctcccactccttatatctttctgtatacattgaatttgtatttagtaaaatgcagacaacaccacggatcggcttttggttggacaattccaaccaaacaccacagcagacagcagaaaacattctgaacgctaggaagccggtatgattgttacatataaggggaagaaaaatttcttttaggtacttgctttcctaaaactgatgtgatataatagcttcattccagaaaaggagtaaaaaatatgcggcaaggtattcttaaataaaactataatcaaatagtgggaacaaaggattatgatagttccttttgtgggggcttgattttttgtacccaatttaagaatacttttgccttatcaattttgacatatccaaaaaaacagcagtcacaaataggtgtatgctgtatatgtgtatgtccgcaaattataatccccagtggtaaaagtattttactgctggggatttttgtgccctttcgggctgtaaaaggaggacaatcacatgaaaataatcaatattggcattcttgcccatgtagacgctggaaagacgaccttgacggagagcctgctatatgccagcggagccatttcagaaccggggagcgtcgaaaaagggacaacgaggacggacaccatgtttttggagcggcagcgtgggattaccattcaagcggcagtcacttccttccagtggcacagatgtaaagttaacattgtggatacgcccggccacatggattttttggcggaggtgtaccgctctttggctgttttagatggggccatcttggtgatctccgctaaagatggcgtgcaggcccagacccgtattctgttccatgccctgcggaaaatgaacattcccaccgttatctttatcaacaagatcgaccaggctggcgttgatttgcagagcgtggttcagtctgttcgggataagctctccgccgatattatcatcaagcagacggtgtcgctgtccccggaaatagtcctggaggaaaataccgacatagaagcatgggatgcggtcatcgaaaataacgatgaattattggaaaagtatatcgcaggagaaccaatcagccgggaaaaacttgcgcgggaggaacagcagcgggttcaagacgcctccctgttcccagtctatcatggcagcgccaaaaatggccttggcattcaaccgttgatggatgcggtgacagggctgttccaaccgattggggaacaggggggcgccgccctatgcggcagcgttttcaaggttgagtacaccgattgcggccagcggcgtgtctatctacggttatacagcggaacgctgcgcctgcgggatacggtggccctggccgggagagaaaagctgaaaatcacagagatgcgtattccatccaaaggggaaattgttcggacagacaccgcttatcagggtgaaattgttatccttcccagcgacagcgtgaggttaaacgatgtattaggggaccaaacccggctccctcgtaaaaggtggcgcgaggaccccctccccatgctgcggacgacgattgcgccgaaaacggcagcgcaaagagaacggctgctggacgctcttacgcaacttgcggatactgacccgcttttgcgttgcgaagtggattccatcacccatgagatcattctttcttttttgggccgggtgcagttggaggttgtttccgctttgctgtcggaaaaatacaagcttgaaacagtggtaaaggaaccctccgtcatttatatggagcggccgctcaaagcagccagccacaccatcgatatcgaggtgccgcccaacccgttttgggcatccataggactgtctgttacaccactctcgcttggctccggtgtacaatacgagagccgggtttcgctgggatacttgaaccagagttttcaaaacgctgtcagggatggtatccgttacgggctggagcagggcttgttcggctggaacgtaacggactgtaagatttgctttgaatacgggctttattacagtccggtcagcacgccggcggacttccgctcattggccccgattgtattggaacaggcattgaaggaatcggggacgcagctgctggaaccttatctctccttcatcctctatgcgccccaggaatacctttccagggcttatcatgatgcaccgaaatactgtgccaccatcgaaacggcccaggtaaaaaaggatgaagttgtctttactggcgagattcccgcccgctgtatacaggcataccgtactgatctggccttttacaccaacgggcggagcgtatgccttacagagctgaaaggatatcaggccgctgtcggtcagccggtcatccagccccgccgtccaaacagccgcctggacaaggtgcgccatatgtttcagaaggtaatgtaaagatacataatcgtcaagacggcaacaatcagaagttatggagggtaacaatggaatatagtaaggaagatttaatggaagcaaaaaagcaaatttggggagtgggagagaacatgggaacagaggaaagtaaaaaaatctgggaggagaacgcacaattttgggataatgcaatgggtgacgaatctaatgaatttcacagagaggtagtgcgtcccaaagtaacggaacttctatctcctaatcctgcggattacattttggatattgcgtgtggcaatggaaattattcttcgtatcttgcacaaagaggcgcttcggttgtcgcttttgattacagcaaaaaaatgatagaattggctaaaagacggcaatcacaatatgcaaaacaaattgaattttgtgtggcggatgcgaccgatagaaaaagtatattagaattaaaaagaaatcgagcctttacgaaagcagtttctaatatggcaattatggatattacggatattgaaccacttcttatggctgtttatgaactgttgcaggaaagcggaatttttgtctttgcaacgcaacacccttgttttgtcacgttgactgaaaaatatatgacaccgcacagttactatgatatagcgattgaagggcaaccgaaagagcagatttattatcatcgttccatacaagatatttttaacctttgttttagagctggatttgtcattgatggattttatgaagaatgttttaaaaccaacaaagaaattcctatggtaatgatagtaaggcttaagaaggtaaaacgtgatagcttaaaataaattcaagtttgtcgggtaaatagcaaacccagccgagccagtcaacggtcaagatgaacggcgcatatgcgcagccgttgacagccccgcccgcctttgctggtaggcaatcaaggggcgacagcaagaagtgccaccgccccgcactattattcagaaaggggaatttccatgaccgaccagatagcctatcaagaatatatccagcgcaggtacaacgccttttgcaagactgttatccgctgtgccgccttggacaagattttgaagcttaaacggcaatgggaacggcaagtttcccttgactatctgatgaacgagaagtttgtccagtttgccgcgtcggagccggacgaggaatacccatttaccgtctgcggtcagaccgtcctgctctgcaacgccgcccttgccgacgcgatctctgttttgccggagcagacgcgggaagaaatcctgcgctattactttctgcgccagccgcagcgcgtgatcggcgcgtgtattggccggtcacgcagcacagcggggcggcatatccagcttgccttgcagcggctacgcgaagaaatgggggtgagccggtatgagtagacttctcccctatgaaacaatcctcaaagcccgtgagggcgacccagaagccgtgaacgctgtcctgctccactacgccggatatatccgctatttctcaaaagtgaacgggcaggtcaacgccgaggtggaggactatgtaaagcagcggttaattgactgtcaattcaagttccggcttgacgaaccaccggacaagtcataaaaactgaataccagccgccaccgacgcggccagcgaaagcagtaagtcttgaaaaagatttactgctttttttgttgtccggctccgctcccggccattttgccccctgccggttgtagtagtaagcgaggagggaatttttctgccctggtgtttggcatttggagcatttacccgtagtagagggcaaagagaaaggatttctccaacaccgggtagaaaccactgcgtccggtgtcattttagcgaaagcgggcaggaatgccctttacaggattagtagtagcagaaaaagagaaacaaacttttgtggttgcagttttccaaaaaagtggcggacggaagtgagagaaagtttgcagtcacggagagcaagtttctaccacggtgccaaaatccgcaattctgcggttttgcccctcgcgggaaacttgttggggagtgccttccccaaaccctgctatggcggcttacgccgcaaaaaagatttccgtccggcaggccgctttttttgcgagaactgccccggaaatacctaacagaccagcctattttttgtgataagtgaaaggaggtttacagcccatgccgaagcgatacaacacgccccaccgcagccgcgttgtgaaaacccggctgtccgaagatgaatacgccgacttcacagcgcggcttgcgccctatggtatcagccagtccgaatttctccggcaggcgatacggcgcaccgccatacgccccgttatccatgtgtcggcggtcaatgacgagctgctttccgctgtcggaaaactcacagccgagtacggcaggatcggcggcaacctcaaccagattgcccggtatctgaacgagtacggcgcaccctacaacgccctctccggcgaggtacgcgccgccatagccgaccttgccgccctcaagtatgaagtcctcaagaaagtaggtgacgcagttggcaacactcaagcatatcaactctaaaaacgccgactacggagccgccgaacaatacctgctgtttgagcatgacgagtttaccatgaagcctgtccttgatgaaaccggcaggcttatcccccgcgaggactaccggctgtccacgctgaactgcggcggggaggattttgccgttgcctgtatgcgggcaaatctccgctatgagaagaaccagcggcgggaagatgtgaaaagccaccactatatcatcagctttgacccacgggacggcccggacaacggcttgaccgtagaccgggcgcaggagttgggcgagaagttttgcgccgagcatttccccggccaccaagcccttgtatgcacccacccggacgggcataaccacagcggaaatatccatgtgcatatcgtcattaacagcctgcggattgaggaagtgccgttcctgccctacatggacaggccagccgacacgaaagccggttgcaagcaccgctgtaccgacgctgccttacgctacttcaaatccgaagtcatggagatgtgccaccgggaggggctttaccaaatcgacctcttgaacggcagcaagaaccgcgtgaccgaccgggagtattgggcgcagaaaaagggacaggccgcgctggacaagcagaacgcccccatgattgcaggcggtatcacgccccggcagaccaagtttgaaacgaacaaggagaagctacggcagaccatacgcgccgcactgtctgcggcgacctcatttgaggacttttcctctctgctgctgcgggagggcgtgaccgtcaaggagcgccgggggcggctgtcctacctcgcgccggacaggacgaagcccattaccgcccgaaagctgggcgacgactttgaccgcgccgctgtccttgccgttttggagcagaacgccgccagagccacagaaaaggccgcagccatacccgaatacccccggcatgggaaaaccggcatacagcccgccccgaaacaggacggtgtgcagcggcttgtggacattgagcagaaaatggccgagggcaaaggccggggctatgaacgctgggcgaccatgcacaacctcaaacaaatggccgcgacgctgaatgtgtatcaggaatacggtttcacttccccggagcagttagaagccgccgttgataccgcctatcaggaaatgcgccaaaccagcggcgaactgaaagcactggaaacgaagctacaagggaaaaaggagttgcagcaacaggtacttgcctatgccaagaccaagcccgcccgcgacgggctgaaagcgcagaaatccgagaaagcccgcgccgcctaccggcaggcaaatgagagcgattttatcatagccgaagccgccgcccggtatttcaaggcgcatggcattaccaagctgcccgcccggaaagcattgcaggccgagatcgagcagcttatctccgagaaagacggcctgtataacacctaccacgaacagaaacagcggttcaaggagttgcagaccgtcaagcggaacatcgaccagattttgcgccgggaggaaccccaccgcagaaaggagcagagccatgagcgataaactgccccgcatggactaccgccagcaccggcgggcgcggcggctggtacatgagtgctgtaactatgacgggggaaactgcctgctgttagacgacggggagccttgcgtgtgcgtccagagcatttccctttctctcatgtgccgctggttccgtgtggctgtcctgccccttgacggggagctggccgcagcccttttgtaccgggggagccggaaacggtgtgcggtctgcggcgcggcatttgtccccaaatccaaccggggaaaatactgccccgactgcgccggacgcatgaagaaaatcaaagccgccgagagaaagcggaaacaaaggcagagatgtcacgctttagagcctttcaaacccgcataaatcaaggcttttttcgtgggtgtcaaagggtacgcgatacatttatccttttcccccggaaacggcgttttaatgcgtgacaatacgccaaaatcaacccgaacacagggaggtgatcctatcgctgattatatcagggcagacacgcggctgcccgcctatctgccgtatccccgtttcctgctgaaaatggagatttcacagaccgccaagctgctgtattcgctgctgttagaccgttccaccctctcccagaaaaacaagtggctggacgacgagggcaggatttatattatctatcccatcgcggagatagcagaaatactggataaaggcagcaccaccatcaagggggcgcttaatgaactggacacggcggggctgttggaacgggaacggggcggcttctccgcaccgaaccggctttatgtcaaagtaccgccagtgccacaggtacagttttcagaccaactgatggccggaagtccgcccctcatagagccggaaaaccgtcctactgatggtcagaaaaccgaccttatgatggtcggaaaaccgtcccctaaccaaactactataaacaaccttacagagagccaaacaaagggagtgagtggggggccgtccgcgccctatggccgatatggaaatatttttctgtcacagaccgaatacgacgagttgcaggcagagtaccctgacaggctggaacggttcatcgaggaaatgagccgctaccttgccgccaacgggaaaagctaccagaactatgccgccgccctgcggatatgggcggggaacgacaaaaaggaagcccctaaaaagggcataccagactactcatgcaaggagggcgagagtttatgaagaacgaaatcaacgctgttttggagaatatgacggccaccaccccggagccggaggactacaccggcgaggacggtttactgtactgcggcaagtgccgcaagccgaaagaagcctattttgcgccggataaggccgctgtctttggccgtgaccgccacccggcagagtgcgactgccagagagccgcccgtgaggaacgggaggccgccgagaagtggcgcaggcaccttgacaccgtggaggaactgaaacgccggggctttaccgaccccaccatgcgggactggacttttgagaacgacaacggcaggaacccgcaggccgggattgcccgccggtatgtggaacactgggaggatatgcgaaccgacaatatcggctgcctgttctggggcggcgtgggaaccgggaaaagctaccttgcgggctgtatcgcaaacgccctcatggagaaagaaatccctgtccacatgacgaactttgcccttatcctcaacgaccttgccgccagctttgagaaccgcaacgagtacatttcccgcctttgccgctatccgctgcttattcttgacgacttcggcatggagcgcggcaccgagtacgggctggaacagattttcaatgtgattgacagccgttaccgcagcggcaagccgctgatcgtcacgaccaacctcacgctggacgacctgcggaacccagaggacaccgcccattcccggatttatgaccgcctgctttccatgtgcgtcccagtacgctttaccggcgacaatttccggcaggaaaccgcgcagcggaaaatggagagcatgaagaaactgattgccgactgaaaggagtattgcctatggcagataacaagcagcacgacacccgcaccacccgccgccccgactgcgtgacggaaatccgcatgggcaattccgtccttgtcgtgtccggctatttcaagaaagacactaccaccaccgccgccgacaaaatggcgcgggtactggaagcggaagccgctgctacacaggagccgacttatccggcgtgagccggggcatggaaaaagcggtcatgccggggagcgtggccgctggaactggaaaagctgaaatcaggactcttttttctttacatcactaatcccaaagagtgcaaacaccagagccaaaacaatcagcgaaatcgtatttgcagatacagagggcatgaaataatcgacgatataaaagccgaaaaatgtagtgatagtatctaacagcacatacatacagacggccattttccttgttattctgtcaaggttaagcaatgcttttggaaatgcgcctgcgactaaattcatgggatatgaaacaatcgacgcgattatgaaatacaggataaagccgccgacactctcatactcaaagccgagcagacgcatgattgcactgctgaatatggcgattatggacaagacggcgatgattagaacagcccccaaaatgaatatgattattttttcccgcttattgttgttgttatccaagagtacctctcccttatgtttggattttgaagctgatatgagtatatcacaggaagatgaacttttctactgaaaccggcacaacaagacgctacacaaaaaccggcgatttgataagctgtaaagaagcagatttgacacttttgccgctatacaaccagccctgttccgtggtacaatgaaaccacggaatagtggggctggctgtcggaaacggaggattttatgttaagacaagccacccaaaacctcattaccgccctttatccgagattgtcccatgaggacgaattgcaaggtgagagtaattccatatcgaaccaaaaacggatactcgaaacctttgcaaaacaaaatggctttaccaacctgcgctggtacaccgacgacggctattccggcgcgaattttcaaaggcccggttttcaagccatgcttgcagacattgaagccgggaaagtgggtacggtcattgtcaaggacatgagccggttagggcgaaactacttgcaggtgggattttacacggaaatgctgtttcctcaaaagggagtgcggtttattgctgtcaacgacaatgtggacagcgcaaacggcggcatggacaacgattttacccctctgcgaaatctgttcaacgaatggctggtgagagatacgagcaagaaaatcaaagcagtaaaacgagcgaaaggcatgagcggcaagcccgttaccagcaagccggtgtacggctacctcatggacgaggacgagaactatatcgttgatgaggaaaccgcgccggtagtcaagcagatataccagctttgccttgccgggaacggcccgaccaagattgcccgtatgctgtcggagcagcaaatccccacgccggggacgctggaataccgcaggacgggcagcacccgccgctatcaccccggctatgagtgtaaatgggcgacgaacaccgtcgttcatatcctcgaaaaccgggagtacaccggctgtctggtaaacttcaagacggagaagccctcttacaaaaccaagcacagcgtagagaaccccgtggagaagcaagccattttccccgaccaccatgagccgattatcgacacggaaacatgggagcgtgtgcaggagttacgcaagcagcgcaaacgcccgaaccgctatgatgaagtggggctgttctccggtatgctgttctgcgccgactgcggccatgtgatgtaccagcagcggtatcagaacaaaacccgcaagcaggactgttacatctgcggcagctacaagaagcgcacccgcgactgtacggcgcactttatccgcaccgacctgttgaccgccggtgtcctctccaatctccggcaagtgaccgagtatgccgccaagcatgagagccgctttgtgaagctgcttatccagcagaacgagatcggcggcaagagaaagaccgccgcagctaccaagcagcttgaacaggcgcaggagcgcattgccgaagtgagccgcattatcaagcggctgtatgaggacaatgtgaacggcaaaatcagcgacgagcgtttcatggaactgtcggcagactatgagcaggaacagcgggaactgaaagaccgcgccgccgctttgcaggccgaactggacaagtcgcaggccgccaccgtcaacgcggaaaagtttatgggtatcgtccgaaagcaccttgcctttgaggaattgacccccacccttttgcgggaaatgattgagaaaatcgtcgtgcatgagtgcagttatgacgagaacggcacccgcaggcaggacattgagatttattacagctttgtcggcaagattgacttgcccgaagcctaatgcccgacctatccgacacaatggccaagtgccggataggaacggcaaaattttttacacttctattacttctttatcgcacatcagcaaagtcccagggcatgaagcagctcatggctggcgctggcgtcgccgtggtcggcatggtcctcgtacccctgctctccagcctgttcaccgtctgatcgctcacgccgttaagctgtcataagaaatccttgccgcccctgcccccacgcgggggcggctgaaaggaggttgacaccgtatggatttcttactggatgcccttaccaactggctcaaggaaatgctggtgggcggcatcatgggaaacttatcggggatgttcgacagtgtaaaccagcaggttgcagacattgcgacacaggtgggtcagaccccgcagggctggaacgggagcattttcagcatgatccagaatctctccaactccatcatggtgccgattgctggcgtgatcctggctatcgtgatgacgctggagctgattcagatgattaccgaccggaacaacctgcatgatgtggatacctggatgatcttcaaatgggtgttcaaatctgccgccgccattttgattgtcacaaacacatggaatatcgtcatgggtgtattcgacatggcgcaaagtgtggtagcgcaggcggcaggtatcatcggttctgacgcttccatcgacatctcctctgttatgggcgatatggagacccggctgatggaaatggatttaggtccgttgattggcttatgggtgcagtcgctctttattggcattaccatgtgggcgctttacatttgtatctttatcgtgatctatggccgtatgattgagatttatcttgtgacttcggtggcccctattcctatggctaccatgatgagcaaggaatcgggcggcatgggccagaattatctacgctccctccttgctctgggcttccaggcatttctcatcatcgtctgtgtggcgatttatgccgtgctggtccagaacatcgcaacagaagatgacatcatcatggctatctggagctgtgtgggctatacggtcctgttgtgctttacgctctttaagaccggaagccttgcaaaagccgtgttcaatgcacactaaggagggttcgtatgggaaaatatcaaatcatttatgccgatcctccgtggagttatcgcgtttggagaaaaaaagaacacggcaggaccgcagagagccattattccactatgaccatagaggaaatcaggacacttccagttgcacaattggcagacaaaaactgcattttatttttgtgggtaactttccctgttattcgagaagcctttacagtgattgacgcatggggatttacgtataaaacagtagcgttttgctgggtcaagcagaaccgacaatcctcctctctgttttggggaatggggcattggaccagagcaaatgccgaactgtgtttgttagcaaccaaaggctccccaaagcgccagtctgcgggtgtgcatcagattgtgatgacaccaatagaaggccacagcaagaaaccggatattgtccgggataaaatcatttcgctggcaggagatgtcccacgtattgagctgtttgctagacaaaccacacctggctgggatgtatggggcaatgaagtagacagctcgatttcatttccataaagaaggaggtaatccctttggcttatgtacccgtacccaaagatctgacgaaagtcaaaaccaaggttgctttcaacctgaccaagaggcagcttatctgcttcaccggcggggcgcttatcggcgtgccgcttttctttttgctccgggggcctgcgggaaacagcgtggcagctatgtgtatgatgcttgtcatgctgcccttcttcatgctcgccatgtacgagaaacacggccagcccttggaaaaaatcgtggggaatatcatccgtgtcacggtgattcgtcccaagcagcgcccgtaccgcaccaataacttctatgccgctttggagcggcaggcaaatcttgacgaggaggtgtacgacattgttcacggcaatcaaaagctggctgcaccggctgttcggaaaaaccgaggaaaaagctgtgcagccggtcaggacaaagaaaaagctgtcccgtgccgacagaaagcagattgaggctgccattgcccgtgccaatcgcacagacaaaaaggaaaaatcagctcaggacagcatcccctatgaacgaatgtggccagatggtatctgccgcgtggcagacggccattacacaaagaccatccaattccaggacatcaactatcagctctcgcagaatgaggacaaaacagcgatttttgagggctggtgtgattttctcaactacttcgacagctcgatcaaatttgagctatcttttttgaatcttgcagcatccaaagagacttttgcccgtgccatttccattcctctccagggggatgactttgacagtattcgggttgagtacatgaccatgctgcaaaaccagctggcaaagggcaacaacggccttatcaaaaccaagtatctcaccttcggcattgacgcggacagcatcaaatcggccaaaccccgtttggagcgtattgagaccgacattctcaataacttcaagcgtctgggcgtggctgccgaaactctcgatggtaaggcaagacttgcccagctccacggcatcttccacatggatgagcagttgccgttccgctttgagtgggattggctcccgtccagtggtctgtccaccaaggacttcatcgcaccatctgggtttgagttccgcactggcaagcagttcagaatgggaaaaaagtacggggcggtcagcttcgtacaaatcctcgcgccagaactgaatgaccgaatgctggcggagtttttggacatggaatccaatctggttgtcagcctgcatatccagtcggtagatcagatcaaggccatcaagacggtcaagcgcaagatcactgacctggacaaatccaaaatcgaggaacagaaaaaagcggtccgtgccggatacgatatggacatcattccctctgaccttgccacctacggtgcagaggccaaaaagctcttgcaggatttgcagagccggaacgagcgaatgttcctcgtgaccttcctggtgctgaacacggctgacaccccgcgtcagctggacaacaatgtattccaagccagttccatcgcgcagaagtacaactgccagctgacaaggcttgacttccagcaggaagaagggctgatgagctgcctgcccctgggtctcaatcagatcgaaattcagcgggggctgaccaccagttccacggccatcttcgtgccgttcaccacccaggagcttttccagaacggcaaagaggcgctgtactatggcatcaatgccttgtccagcaacctcatcatggtggatcgcaagctgctgaaaaaccccaacggcctgattctcggtacgccgggttccggcaagtccttcagcgccaagcgtgagatcgccaactgttttctgctcacaaccgatgatgtcatcatttgtgacccggaggcagagtacgcacccctggtggaacgcctgcacgggcaggtcattaagatttcgcccacctctaccaactacatcaaccccatggacctgaacctggattactcggacgatgaaagcccgctgtccctcaagtccgacttcattctcagcttgtgtgagctgattgtgggcggcaaggagggcttgcagccggtgcagaaaaccatcatcgaccgttgtgtgcggctggtgtatcaggactatctgaacgacccgcgcccggagaatatgcccgttctggaggatttgtataaccttttgagggcgcaggacgaaaaggaagcgcagtacatcgccacggcgcttgaaatctacgtgaccggctccctcaatgtgttcaatcatcgcagcaatgtggacatcaacaaccgcattgtctgctatgacatcaaagaattgggcaagcagctcaaaaagatcggtatgctggtggtccaggaccaggtatggaaccgtgtcaccatcaaccgcgctgcccacaagtccacccgttactacatcgacgagatgcacctgctgctgaaagaggaacagaccgccgcctacacggtggagatttggaagcggttcagaaagtggggcggtattcccaccggtatcacgcagaatgtcaaagaccttttgagcagccgcgaggtggagaacatctttgaaaactccgactttgtgtatatgctcaatcaggctggcggggaccggcagattctcgccaagcagctgggcatttctccgcaccagctgtcctatgtgacccattccggcgagggcgagggcctgttgttctatggcgctacgatcctgccttttgtggatcacttccccaaggatacagaattgtatcgcattatgactaccaaaccccaggaactgaaaaaggaggatgaatgaccatgaatcccaacactgaactgaataccatgatgttttttgacgatgccctggagagtgagcgtacctacctgctcaccgagctggccgatgccgtcagcgagacccgcacggcggcggatcaggcagcccagctgagcgaggatggcgaggcgggcctgctgcgcctgacggaaatctggtgcgccatgaacggtgttcccgctgtcatcatcttcgagggcagccagtctgagctgctggccaatgtagtggcgcagatctacgcccatctgctccagcaccctttccatgaccctgtgggactggccgtctatgtggagctgcgctacatgacggacgctctcatgctgggggaatggtttgaataaggagccgcgcctgcgctttacagacgaggaacgggctgacccggcgctggagaagcccatccgcaaggcggacaaggccgccgccaaagcggataaggcgcaggctaaaattcccaaaaagcaggtccggcaaaagacgctggacccggagaccggtaaagtgaccaccaagctggtgctggaggacaagaagaagccgccctccaagctgtcccatgcggtgcgggatacccccgccaatgccgccctggggaaagttcacaagaaaatccgggagaccgaacaggacaatgtgggcgtagagagcgcccacaagtccgaggaggctgccgagaccggcgcacggttggttcgggaaggctaccgcagccacaagttgaagccctaccgcaaggcagcccaggccgagcagaagctggagaaggccaatgtgaacgccctgtatcagaagtccctgcgggaaaatccccagcttgccagtaaccccatttcccgctggcagcagaaacaggctatcaaaaaagaatacgctgccgccaaacgcgccggtcaagctgccggaaataccgccagcaccgcaaaaaagaccggcaaggccgccaagacggtcaaggaaaaagcacaggaggcaggggcatttgtcatgcgccacaaaaagggattcctggttgcgggtgcaatcttcctgctggtctgtatgctgctcaacatcatgtcctcttgctctgtgttgagtcaaggaattggttcggcaatttccggaaccacctatccttcagatgacccggaactggtggcggtggaggctgactatgccgccaaggaaacggcgctgcaagctgagatcgacaatatcgaaagcagccatcccgggtatgacgaataccgttatgacctggatatgatcgggcatgacccccatgagctggcagcctacctgtccgccgtgttgcagggatatacccgccagagcgcccaggcggaactggagtgtgtattcgatgcccagtatcggctgacgctcaccgaggaagtggaagtgcgttatcggacagaaacccgtacagacagcgagggcaacagctataccgttgaggttccctacaactactacattctcaatgtgaagctcaccagcaagcccatatcctctgtggctttggagctgctaaccccggaacagctggaaatgtaccaggtgtaccggcagacgctgggcaacaagcccctgattttcggcggcggttccacaaacaccagtgattccgagagtttgaccggtgttcagtttgtcaacggcacccgccccggtaatcaggctgtggtggatatagcgaaaagtcaggtgggcaatgtgggcggtcagccgttctggagttggtatggctttaactcccgtgtggaatggtgcgcctgctttgtgtcctggtgctacggccagatgggactgtccgaaccacgctttgcaggctgtcagtcccagggcgttccctggttccagtctcacggacaatggggcgggcgtgattacgccaatatcgcccctggcgatgccatcttcttcgattgggatcttgatgggtctgcggaccatgtaggtcttgtggtcggcacggacggtagccgagtttatacggttgagggcaacagcggcgatgcctgcaaaatcagaagctatgacctgaattacgagtgtatcaagggctatggcttaatgaactggtaacagagatttctataaaggagtgattcacaatggctaagaataaaatccagcgcattgaccaggagattgccaaggtccgcgagaagattgcggagtatcaggaaaagctgaaaaccctggaagcgcagaaaaccgaggcagagaatctggagatcatccagatggtacgcgccctgcgtatgaccccggagcagctgaacgctatgctctccggcggtacggtccctggcatggccgctgcttctgccgactacgatgaacaggaggacaccgaccatgaagaataagaggattttcaaaaccttttcggccctgtgtgcggctctggtgctgatggccagcttctccgtgacggcctttgcccaggggacagaccagcccccggcagaggataccaccaacgacagcaatgtggtggtggaggaaaccgaggacagtccggccctgaccccggagggcaatgccgccctggtggatgatttcggcggcaacaagcagcttatcaccgtcaccaccaaggcgggcaactacttctacatcctcattgaccgtgccaacgaggacaaggaaaccgccgttcatttcttgaatcaggtggacgaggcggacctaatggcgctgatggaggacggccagaccacccaggagcagcccgccacctgtacctgtacggagaaatgtgtggccggtgcggtgaatacggcctgcccggtgtgtgccaccaatatgagcgcctgcacaggtaaggagccggagccggagaccccggaggaaaccccggagccggaggaaccggcgcagaacgccacagggctgaatccggccattcttttagtggtgctggccctgatgggtggcggcggtgcttttgcctactttaagctggtgaaaaacaaacccaagaccaagggcaacgacaatttggacgattatgactacggcgaggatgataccgaccaggaggacgaggactcctgggagaccgaggaatctgacgagctggacgctgacgggggcggcgacgaggaaagcgaggacaagacggtttgacccgcttcaccgacagcccctatgaacgcatgatgacacgcaggccggagggcgggaaggaaacttcccgtcctccttctttatctcccggccacccctgttatggctgcggaaattaccgtgacggtcagccctgcgtgggattctgccaccggcagctgaccacatggctgcgggaaaggaggatgaaaaaccatgaagctggtaatcgctgagaaaccgtccgttgcccaaagtctggccgccgtaattggagcaacaacccataaggacggttatttagagggcaacggctggcgggtcagctggtgtgtgggccacctggctggactggccgacgccgatgcttataacccggagtacgccaagtggcgctatgacgatctacccattctgccagaaccctggcagatggtggtgagcaaggacaagaagaaacagtttgatgtgctgaaacagctgatgaacgccccggatgtgaccgaggtggtgaacgcctgcgacgccggacgcgaaggtgagctgatcttccgcgccgtctacgagctggcgggttgcaccaaacccatgaagcgactctggatttcctcgatggaggattccgccatccgggagggctttgcaaacctgcgccccggtgcagattatgacggcctgcgggatgcggccctctgccgcgccaaggcggactggctggtgggcatcaacgccacccggctgttttcggtactgtaccaccggaccctcaacatcgggcgcgtcatgtccccgacgctggcccttatcgttcagcgggaggccgagatcgacaccttcaagccggtgccgttctacacggtcacgctggaactgcccggtttcaccgtttccggggagcgcatggcggacaaggctgctgccgagcagctgaaaactgcctgtcagggtgcggctgtgacggtgaaaaaggtggagcgaaaggacaaatccgagaagccgcccgctctctatgacctgaccaccctccagcgggacgccaaccggctgctggggttcacagcccagcaaaccctggactatttgcagaacctctatgaaaagaagctctgcacctatccccgaacggacagccgctatctgacgagcgatatggctgaaagcctgcctgtgctggtcaatctggttgccaatgccatgccgtttcggaaagggattgccatttcctgcgatgccggtgcggtcatcaacgacaagaaagtaaccgaccaccatgcggtgatccccacccgcaacctccagggcgcggacctgaccggcctgccggtgggcgaaaaagcggtgctggagctggtggccctgcggctgctgtgcgccgtagcccagccctatatctttgcggaaaccgccgtcgttgtggagtgcgccggagcagagtttaccgccaagggccgcacggtgaaacaacctggctggcgggcgctggacgctgcctatcgcgcagggctgaagaatgtggagcaggacaaagaaaccgaggacaaggcgctgccggagctgtctgaaggtcagacgctgcccctttctggtgctgccgtcaaggagggcaagaccaccccgcccaaacatttcaccgaagatacgctactctccacaatggagactgccgggaaggacgatatgccggacgatgccgagcgcaagggcctgggaactccggccacccgcgccgggattttggaaaagctggtatccaccggatttctggagcgcaaaaagagcaaaaagcaagtgcagctcatgccctcccatgatgcggtatcccttatcaccgtgctgccggaacagctgcaatcacccttgctgaccgctgaatgggagtaccggctgggtgagattgagcgcggcgagctggccccggaggatttcatggacgggatttccaccatgctcaaagagctggtgggaaactatcaggtcatcaaggggaccgagtatctgttttctccgccccgcgaagtggtgggcaaatgcccccgctgcggtggcgatgtggcggagctgcaaaagggcttcttctgccaaaatgagggttgtaaattcgccatctggaaaaacaacaagtggtgggccgccaagaaaaaacagcccaccaaagctgtggtgacggcgctgctcaaagatggccgcgcaaggatcaccggctgttattccgaaaagaccggcaagacctacgatgccacagtggttttggaggatgatgggcagtacgccaatttcagattggaatttgaccagcagaaaggcggcaaacgatgaagctctccctctacgaacaggaaaccatcatcctctacaaccaggccgataccactgctgaggtctatacccatgatcagaaactgatggaaaagctgactcgactttcccaaaagcatccggaacaggtctgcaaaaaagataagcacagttttacggttcccaaacgctgcgtgtcggtccgggagccatacagcgccgagcgccgcaaggccgccagtgaacgggccaaggctgccggatacaggccgcccacctccaagaagggcagcgagtaagcatggctgagagtgtctttgaggccgtcaaagggtctgtcaccgtccgagaagcagcacagatgtatgggatagaggtcaaccggagcggcatggcctgttgcccgttccacgatgataaaaatcccagcatgaagctgaacgaggaatatttctactgctttggctgcggagccaccggcgatgtgatcgacttcacagcgaggctctacaatctgtcccccaaagaggccgccgagaagctggcccaggattttggcttggcttatgacagtcaggctcctccccggaggcgctatatccggcaaaaaaccgaggcgcaaaagttcaaggaggaccgggaccatgcctttcgtgtcctggccgactactttcatttgctccgcaagtgggaaacggactacacacccaaaacaccggaggaaaatccacacccccggtttatggaagcaatccaacgaaaggactatgtgggctatctgctggattttttcctggaggacggccctgacgaacaaaagctgtggattgccgaacaccaatcagaaatcgccaatttggaaaggagagtgaaaatcatggctgataagcccaccaaccgggagcggttgcaggaaatcacggcgggcattgaacagggtatcaaggagctgtttgagagcgagaagtatatgcgctacctgtccgtcatgtccaagttccaccgctactccgtcaacaacaccatgctcatctatatgcagcgcccagacgccaccctggtggccgggttcaacaagtggaaaaatcagtttgagcgccatgtgaaaaagggcgaacatggcattaccatcatagcgcctacgccctacaaaaagaaaatcgaggaaatgaagcgcgacccggacacccatgcccccatcctggacgcagacggcaaggcggtcatggaggaaaaggaaatcgaaatccccatgttccgtccggtcaaggtgttcgatgtgagccagacagacggcaagcccctgccggagctggcctccagcctgtccggtacggtgccacactatgaggcgttcctggaggcgctgcgccgctccgccccggtccctatcgagtttgagccgatggccgagaacatggacggctatttttcctccgaacagcagcggatcgccatccgggaaggcatgagcgaggtgcagaccgtttccgctgccgtccatgagaccgcgcacagcaagctccacgacccccaaaagtatgaggcggagccgacctggaagatcgtcatggtgagcgagggcggcaccaagcatgacttccgcctggactttgccaccgaagcggaggcagaaaaagctgctgccgaggacggttggcgctatgtagacgagaatcggtttgagtggcggctggaggtggaggaagatctgacggcggtgaaacaggctgtcaagaaccgcaacaccgaggaagtggaggccgagagcatttcctatgcggtctgtcagtatttcggtatccagaccggcgaaaacagcttcggctacatcgcttcctggtccaaggacaaggagctgaaggagctgcgggccagtctggagaccatcaataagacttcctgcgagttgatctccgacatcgagcgcaactacaaggaaatctgcaaggagcgcggcattgacctgaccgccgccccggagctggagcagacaccccggcaggccacagaggaaaaggcagctgcggaagaagtatctcagcccagcgctgagtaccgggaggccctgctggtgctggatgataccagctatcttcatgttcagccctgcgacaccggctgggactacacgctctatgatgtgacaaccatgaatcagttggacggcggccagctggatggaccgaacatgggccgttctgaggccatcggccacatttgcgaggacctggggatgggcggcaagtccatcaagtatgccccgcttgccatgatcgagactttgcaggagatcgcctaccagcataccgcagaagctgccactacccagctgccggatgctcagaagcaggtgttggacgagtatcccatgccggacccggcgctgacgcaggatgatttggagaaatgcggctacctggacagcgacttgctgcccctctccaaagagagagcctatgagctgatggagcgtgacctgaccgtttacattgtccaagagggcgagaacccggaaatggcctttgataccgccgacctggacgcccatgacggtatcttcgccgtgtcccgcgaggaatgggaggaaagcccggagtttgataagctggtcaaggaccgtatggaccaccaggaggaacgggagcaggcgtttctctcccacaagggcgactgcttcgccatttatcaggtgaagcacaccgacgagctgcgggacatccgatacgagggcctggaatggatcaagtccattgggcagacggtgcagcgggacaactatgagctggtctacaccgctccgctgctgccctctgatctgaaaggcgataccaccgaacagctcttttaccgcttcaacaatgaacatcccgccgattaccgccatccgtccatgagcgtcagtgacatcgttgccatcaagcgggatggcaaggtatcctgtcattactgcgacagcttcggctttgagcaagttcccggattcctgccggacaatccgctgaagaacgcggaaatggcggtggaggatgactatggcatgatcgacggtatcatcaacaacggccccaaggaaccgacggtggcccagctggaacagcaggcccgcagcggccagcctatctctctcatggatttggctgccgccgcccaccgggaggaccgggaaaagaaaaagtccgtcatggagcagctgaaaagccagcccaaggcggaacacaaaaagacagcgcccaaaaagagcgcggaaagggagatttgatatgggaaacttcacttttgaggaaacgaacctgctttgtatctacaacaccggcagccgcaccgggctgatcgaagccctgacggagatgtgcggtgagctttcgccggaggaagccgagctgcgggagctgacggacagcgccctctccaagctccgggctatgagcgacgccgagtttgccgagctggagctgtacccggatttcgacgagtaaaaaccacaccaagacccagcggggcggcctgatgtgccgccccatttctatttaacatgaagggaggacagaaaaccatgccatccaaagctgaattttaccggcagatggccgaacaggtatcgacccggcttgtgggcagctggaaagaatggacagcctttctcactactgccgcccgcctctacaaatacccattccatgaacagatgatgatttacgcccagcgcccggacgccaccgcctgcgccgagtacgacctgtggaatgaaaaaatgggacggtatgtgcgccgtggctccaagggtatcgccctggtggacgattccggcgacaggccccgcctgcgctatgtgttcgatatttccgacaccgggacccgtgaacattcccgtaccccctggctgtggcagctggaggaacagcacatcgggcctgtgtcggccatgctggagcgcaactacggtgttgccggtgacgatcttgcccaacagctcaccgatgtggccggaaagctggcgagtgagtattgggacgagcatcagcaggacttccgctacatcgttgacggttcgttcctggaggagtacgatgaactcaacatcgaagtccaatttaagtccgccgccaccgtcagcatcgcatacgccctgatgtcccgctgcggactggatacggaacaatatttccagcatgaggacttcatgccgattttcgatttcaataccccggccacggttggggcgttgggagcggcggtcagccagatgaaccagcaggtgctgcggcagatcggcgtcactatccagaactatgagcgcgaacaactcgcggaaaggagcgttacacatggagaacaacctgacttacacgaggaacggcgattacctgattcccgacctgagcctgagcgaacagccggagaagctcctgggcaagtacggcaggatgcggaaagcgtacctgaaggaacaccggcccctgatctacaaccagctgctgctgaccgagaagctgtacccgcacctgctggaaatcgacgagacggcgaacagccgtctggagcagatgattcctcagttggcggagtcggcgggcgcgacggaggagctgaaagcccgcgatccgatgcgctgggtgggcctgatgaacacctgcaaggcccaagtggaggagattttgatggcggagcttatcaacagctaaccctaaacctgttcctctccgaagctgaacaaatccaaagaatagatgaagcagagaatgtgaaaacatcctctgctttttcttttgcccaagaacagccgcagcctgacccggctgtgtgggaatacaacggtgtcaaggagcgacacccagatgatatggtcctgtatcagatgggcgatttcttcgagatttatggcgaggacgccaaagaagccgcgccggagctggggttgcaactggtctcccgtgctatccctgtcggtggccgtgtggaaatgtgcgggtttccggcaaaccggctggagcagtacctggaacagctccgggccaagcatgatgtgacggtctccgccaccctggagggcagcacccagcgccgggagtattccgtcccttctatcgaccatgaggccgaacaggacatcaacgcccatgaagcggagtatggtgctgacgggttccaggcgttccgggacgaagaagccatccaagccgccaccctccgggagctgcatgagcaatacaagcccatcgtgctggaggctgttacccaggacatcagataccggaacgcctgcggtcacagtgactacgagaacgccgtgatcgagggcaacgccgctattcgccgtgccgtcctggggtccggtaatatggggctgcttcgcctctattctgacaccccggagttccggcagcgccttcatcgggaagtcatagacgagacctatcccaagctccatgagctgctgcgccctctctcggacaatgacatcgacagggcaatccaggactggaacggtaaaattgaaagcaaacacgccgttgttcgctacatgaaagaccatgcacgggagaaagacaccgctgtatggctggcccatgagtttgatggcagcgacggaaaaactccgtttgcggtccgcccggaaagccccgaaggaacggcgctgccttggcccaaggtacagcgccggattgcccagctcatcaaggaggatcgcttctacacccaggtcgaacaggataatctggacgatgtggaccccatcgccatccgggaggccctggcccagcgtggcattgtggacggccatgtggtggacccggaaaagctggacaatgacccctttattcagcaggtcatgcgggatgtggaggccatatccagggagaccactcaagccgaccagccggaacagccttcttccggcgattcgcgtgttcctgtgtcagacgaagaatatgctgcggcccgtggcacggtccgggaacggatttcttatgatccaacagtccctccatacaatgtgggggatattgtctatctggatgacctcgcccaccagatcacggagctgcgggatgacacggtgcagctgctgcccaccggcatgagctatcccatctaccgggctgagagccgggaacggtttgagcagcttttgcgggaggataaccgcaatgacttctataccgagttcctgcctgcaaatctggatacggtggaccaggacctgcgggatgtgcttgcccatggcctgattggtgaagcggacaaggcggagctttccgagcttcttcgcaacggcaagagcaaccaggaggtggccctgtggctgagccgggcctatcccaacatcgtggaaacgatggagctggagaccggcgagaccgccgattaccgcacgatgccggaaggtattgagctggaagtgctggatgcagatgaaaagcgtctggccatgctgttcttccagtggagcgaggttgcgcctttgctgcgcgggatgtatgcccgtcagctggacggttttgggcaggaacgccccgaaccggctgccgaagctccgaccttccaatccgagactgtggctgtctatccgggcgacaagaaccatctgccctatgatgtggttgttcagaccctgagaaccaatgagccggagcctcctacacctgtcaccgagccggagaaaaccccggatgaagtgctggacgaacaccccgtttccattcaggtaaacggcgagtggcagaccttccccaatgtcaaagctgccgagaaagcctcttatgaggaatacaaggccaatctgcgccgcaccgccgagaatttccgtatcactgacgatcacctgggcgaaggcggccccaaggccaagttccaggccaatgtcgaggcaatcaagctgctgaaatacctggaggaaaccaccgggcaggcaacgccggagcagcagcaagtcctctcccggtatgtgggctggggcgggttggcggatgcttttgaccctgacaaggaaagctggagcaaggaatatgcccagctgaaggagttgctgaccccagaggaatatgccgctgccagaggttctaccctcaacgcgcactacaccagccctacggtcatcaaagcgatttacgaggctgtgggccgtatgggatttgagaccggcaacatcctggaaccgtcctgcggtgtgggtaatttcttcggtatgctgccggaggaaatgcggaacagccgtctgtacggcgtggagctggattccatcagcgggcggatcgcccagcagctctatcccaaggccgacatcaccgtggccggttttgaaactaccgacaggcgggacttctatgaccttgccatcggcaatgtacctttcggccagtatcaggttcgggacaaagcctacgacaagctgaatttcagcattcataactacttttttgccaaggcgttggaccaggtgcgtcccggtggcgtggtggcctttgtcaccagccgctatacgatggacgccaaagattccaccgtgcgccggtatcttgcccagcgcgccgagctgctgggggctatccgtctgcccaacaatgcgttcaaggccaatgccgggaccgaggttgtatcggacatcatcttcctccaaaagcgagatcgcccgctggacattgtaccggagtggacgcagaccgggcagaccgaggacggcttttccatcaaccgctatttcctggaccacccggaaatggtgctgggccgacaggaatcagaaagcaccgctcacggcatggactacaccgtgaaccccattgaggggctggagctggccgatcagctgcacgatgctgtgaagtacattcgcggcacctaccaggaggccgagctgccggagctgggcgaaggcgaagccatcgacacctctatccccgctgaccccaatgtgaagaactactcctataccgtggtggacggagctgtgtatttccgggagaacagccgcatggtgcgccccgatctcaacgccaccgccgaggcccgcattaaaggcatggtgaggctgcgggattgtgtccaggaactgatcgacctgcaaatggacgcagctacaccggacagcgacattcgtgagaaacaggtggagctgaaccagctctatgacgatttttccgccaagtacggccttatcaatgaccgggggaaccggctggcctttgctgatgattccagctactatctgctctgcgcgctggaagtcattgacgagaatggccaactgaagcacaaagcagatatgttcacaaagcggaccatcaagccccatgaggcggtgacttccgtggacaccgcaagcgaagctctggccgtatccatcgcggaaaaggcccgtgtggacatggagtatatggaacagctcaccggcaagaccagtgacgagctggccgccgagctgcaaggcgtgatcttccgtctgcctgggcctgtgccggagggagaacggcccacctatgtgaccgccgacgaatacctttccggcaatgttcggcgcaagctccgtcaggcacagcgagccgcacagcaggacccggcctttgccatcaatgtggaggccctgaccgccgcccagcccaaagatctggacgcttcggagatcgaggtgcgcctgggcgctacctggattgacaagaagtacatccagcagttcatgtatgagactttcaacaccccgaactaccttcaacgcgccatccaggtcaactatacctcctataccgccgagtggcagatcacgggcaaaagctctgtctccgaaaacaatgtggcggcctacaccacttacggaaccagccgtgccaacgcctacaagattctggaggacagcctgaatctgcgggatgtccgcatttacgacaccgtggaggatgcagacggcaaggaacgccgggtgctgaacgccaaggagaccactctggccgcccaaaagcagcaggccatccgggacgctttccgtgattggatttggagggacccggagcgccgccagaccctggtgcgccagtacaacgaggaaatgaactccacccggccccgtgaatacgacgggtcccacatcacctttggcggcatgaacccgtccattaccctgcgggatcaccagctgggtgctattgctcatgtgctgtatggcggcaatacactattggcacacgaggtaggcgctggcaaaacctttgagatggtggccgctgcgatggaatccaagcgcctggggttatgccagaagtccctctttgtggtgccgaaccacctgacagaacagtgggcatcggagtttttgcggctttatccctctgcaaaaatcctggtcacgacccgcaaggattttgagacccacaaccgcaaaaaattctgtgccagaattgccaccggagactacgatgccgttatcatcggacattcgcagtttgaaaaaatccccatcagccgggagcgccaggaacggctcctctacgagcagatcgacgagatcaccgagggtattgctgaggtgcaggccagcggcggtgagcgtttcacggtcaaacagctggaacggacccgcaaatccctggaggccagactggaaaagctccaggctgagagccgcaaggacgatgtggtgacttttgagcagcttggcgtggacaggttatttgtcgatgaagctcataactacaaaaatttgttcctttacacaaaaatgaggaatgtggcgggcctctccaccagcgatgcccaaaagtccagcgatatgttcgccaagtgtcgctacatggacgagatcaccggcagccgaggggttatctttgccactggcactccggtcagcaactccatgactgaactttacaccatgcagcggtatctccagtatgaccgcttgcaggaactgagtatgacccactttgattgctgggcgtcgcgctttggtgaaacgacaacggcgctggagctggcaccggaaggcaccggctaccgggcgcgcacccgcttctccaagtttttcaatctcccggagctgatgaacctgttcaaagaggtggcggatattaaaaccgccgatcagcttcatctgcctaccccggaggtagaataccacaacatcgtggcccagcctactgaacaccaaaaagagatggtgcaggttctctccgagcgtgcctccagagtacacagcggcagcgttgacccctcagaggacaatatgctcaagattaccggcgatggccgcaagctgggtctggaccagcgcattatcaatcaggcgctgccggacgaacctggcaccaaggtcaaccaatgtgtcgcaaacatcatgcagatctggcgagacggcgaggctgacaagctgacccagctggtgttctgcgatatttccacgccccaggcgtccccttccaaaaaggcagccaaggcgctggacaaccccacgctccatgcgctggaacaggctgtgccgctggaagagccggagccggtctttaccatctacgatgacatccggcaaaagctcattgcccaggggatgcccgccgatcaaattgcctttatccatgaggccaacaccgaagtgaggaaaaaggagctgttcgccaaggtccgcaccggccaggtgcgcgtcttgctaggcagcaccgccaagatgggcgctggcaccaatgtgcaggaccggcttgtggcgctccatgacctggactgcccgtggcggccgggagaccttgcacagcgcaagggccgtatcgagcgccagggcaaccaaaatcccctggtccatgtgtaccgctatgtgactgagggaacctttgacgcctatttgtggcagacggtggagaacaaacagaaattcatcagccagattatgacttccaaatcgccggtgagaagctgcgacgatgtggacgaaacggcattgtcctttgccgagatcaaggccctgtgcgccggagacccccgtatcaaggagcgcatggacctggatgtggaggtctccaagctgaagctgatgaaagctgaccaccagagcaagcagtatcgtctggaggaccagctgctgaaatacttcccggaggaaattgaaaagcacaagggctttatccaggggtttaaggcagacctggagaccctggccgcccatcctcacccggaggatggctttgccggtatggaaatccggggcgatgtgctgaccgacaaagaaaacgccggtgcagctctgctggacgcctgtaaggaggtcaaaggctcggagcctgtgcagatcggcagctaccggggcttcactatgtccgtggagttttcagcctggaaacaggaatatacgctcctgctgaaaggccagatgacccaccgggcaagcctcggcacagacccacgcggcaacctgacccgcattgacaatgcgctctctcaaatgccccagcgcctggaggcgaccaaggcccaactggacaatctgtaccagcagcaggccgccgccaaggaggaagtgggcaagcctttctcttatgaggatgatctgcgggtaaagtccgcccgtctggtggagctggacacgcttctgaatctggacagcaagggccgctctcagccggagtccgtgattgccaagagcgcacggccctcggtgctggacagcttgaagcgtccggtgccgccccgcagccccgaaaagaaaccgaaacagcatgaggaggtgcgataacatgaataccaacgatctgaatacggccctctatgagaagatggccgctgaacaggacaaataccgggactggctgaaaagccagcctccggcagaggtcctgaaccacgcctacgaatacaccgtccgggaggacatcgtgatggcgatggaggagctggagctgaccgacgcccaagctcaggccctgttggattctcccacgccgctggccgatgtgtaccgtcactttgagaaactggagaccggctacatggatgtgatccgggacagcattgagaaccgggccgatgatgcttgcaaggcccaggcggagctgcggaaagccgccatttacccccactccgctgcctatgcgaaagagcatggagagctggagcagtaccgggcttccaacaacgccaatctccaatgcaaggaggccattgaagctgcggtgcgggaacacttcgacgggatgtatctcagtcacgatgccgccaagggtgtgatcgagacctacggcatggaccgggtcatgctggtccttgccaacaccgtccagctccaggactgggatgggcgctactcgccccgcaacaaggaatgggcaaagaccatccccaactacaactccgataccgtccggtgtgggtatgccctgaacagccaccccgctgttttgaacgggtttattgatctggtgcgcgaggaacatctgcgccgccagcccttgacggcagaggacatccaggcagaggcagaacggattttgcgggagctgcgcgcaccagatatgccgaacagcccccacgggacccattacatggcccgcatttccccggagtttctgaatcgtgccgggagcaaagaccatgatcggctgatgaatctcctgccgtttcgcagtctgtcgtttaccggtatgaagggacttcctggaacctatgccaccattctgggcagcgaggaccgctccaaggagctgcgccagccccggccttctgtccgggagcatttgaagcaggaaccgaaacaggcagcccccaaagctccgggccataagaaacgggagccggaacggtgagcactccaaagcgcaaacgggaggtccaggtgaattttcgggtctccccggaggagctggcgctgatcgagcagaaaatgtcccaacttgggacgaagaaccgagaagcctatctgcggaagatggctctggacggttatgtggtgcagctggacttgccggagctgaaggagctggtgtctctgctgcgccggagcagcaacaacctgaaccagctcacccgccgagtacatgagaccgggcgtgtctacgacgctgacctggaagatatagcccagcggcaggagcagctatgggagggcgtgaaggaaatcctgacccagctctccaatctatcgtgacaggggtatatatcccatctgcggagggaggaacggcgttcttttcgccgcgcctccctccgctttttctttttgtctgtatccttgccttttgacggggcttgccggataataaaggtagatagcaaagtgttctcacatctcacaaaggagttgagataccgatgttgacctttgaaaaggttttagagattttcgaggactatctggcgcaggatatggagctggaagtctacaagagccggtacggatatgtctgcgtatccttcaacggctcgcccccggacccgccctattgcgagggtgatgtgtgccggaccccggaggaactgtttgaccatctgctggtcgagtacgaatcctttgcctccattcagctgacaaagggacgccgggaagaaaacgaggccgacgaggaacaggtccgccgtctatgccagaagtatttagatcgtcgagaggaggctatgaaatgaccgtattgaagctgattatgaagattgtgattgcgccggtgatcctgctgctcaccctggccatctggatttgcgtggggctggtctatgtatctggcttggtgctggggctgctcagtacggtgatcgccctgctgggcgtggccgtcctgatgacatactccccgcagaacggccttattctgttggtaatcgcgtttctcataagcccctttgggctgccgaaattggccttttggctgcttggcaaggtgcaggatttgaagtttgcaatacaggatttggtctacggataatattggagagaaaagtgcagccagccggtttgaacccggctggctgttttactgctctggatgctttagagctgcctttatcattgcaagtgcaagctcttgttttgacagtggcgcatctttccatagcatttcaatttcatggattttactgatctcattttcgctcaattcatcctgcaacagatagtcaggagaaatgtggagcgccttgcaaatgtcgatgaataccggcaggctgggcatcttggctccaccttcaatttgccgcagataagtggcattgatgttacataattccgataatttgtcggctgtcaggccacgagacttccgcacctcgttgatgcgctttcccaatttgctttgttccatagtccacacccgtctattagctgttagcgattattttatgtactctaagactacattatgattgcgggttataatagcgtctgttagactatgttttataagctgtcagctttgcttttgattgaagctcagaacaatagctttagaaagtgaggacaaggtatgattgtaaccttttgtggccatgcacagatctcgcagagtgagaaaatagagaaatggttatacgctgttacgcaaaaactgattgaacaaggagcgactaccttttacctgggcggctatggagcctttgacttattggcggcgtctgttctgagagcgcagaaaaaacggtatccgcagattgagctgatccttgttctggcatatctaaacaccgggaggaacacttccggttacgacagcaccgtgtatccgccgttggaaactacgccacgccgttttgcgatttctcacagaaatcgctggatggtagaggccagtgatgtggtagtagcgtatgttctccatgattggggtggagccgccacaacactgcggtgcgccaaacagaaaaagaaacaaattatttcttaccgtgacgagataggcagttaaggctgcctatttttttgaagggaggcaacctttatggcaaccacacgcatcatgccgctgcatatcggcaagggccggaccgagagccgtgccatcagcgcgattatcgactatgtggccaatccgcaaaagacagaccacggcaagctcatcaccggctacgagtgcgacagccgtgtggccgacgccgagtttatgttggccaagcgccagtatatcgccgccaccggacgggttcgtggagcggacgatgtgatcgcttaccatgtccgtcagtccttttgtcctggggagatcaccccggaggaggccaaccggttgggcgtggagtttgccaagcggttcaccaagggcaaacacgcctttatcgtctgcactcacatcgacaaagcccatgtccataatcatatcatttggagttcggtcaatctggactgtgaccggaagttccgcaacttttggggcagcacgaaagctgtccggcgtttgagcgacaccatttgcattgagaacgggctgtccattgtagagaatcccaagccccacggaaagagctacaacaagtggctgggcgaccaggcgaaaccgtcccatcgggaattgctccgtgttgccattgataaagccctggcacaaaagcctgctgatttggacgagctgctgaagctgctccgggaatccggctgcgaagtatccgggcgcggcaaatcctaccgcttgaaactccccggctggagcaaagtggcccgtctggacagtctgggtgatggctacaccctggaggacctgctggctgtcctcgccggtcaaaaggagcatacgccccgtcagaaaccggtcaagcaggcagatccgtccaaggtcaatctgctagttgacatccaggcaaagctccaggccggaaaaggtgccgggtatgtgcggtgggccaaggtttttaatctgaaacagatggcacagaccgtgaactatctcaccgagcataacctgctggagtatgctgtgctggaggaaaaggctgcggcggccacggcccaccacaatgagctatcttcaaaaatcaaggcagcggagaaacgcatggcggagattgctgtgctgcggacccatatcatcaactatgccaagacccgtgacacctatgtggcttaccggaaggccggttactccaagaaattccgcgaggaacatgaggaggaactcctgctccatcaggcggccaaaaaagcctttgacgatatgggggtcaagaagctgcccaaggtcaaggagctgcaagccgagtatgctcggctgctggagaaaaagaaaaagacctatgccgagtaccggcgctcccgcgaggaaatgcgggagctgttggcagcaaaggccaatgtggatcggctcttaaacatggaggcggaacacgatgccgaaaaagaaaaagaccgcgaccagcggtgagctggtcatggtcaaaagcgtccatcggacgcgcagccgcagaatgaaattctgcgttcatgggggcttgggggattccctcaacaagcagcgccggaaaccaaatggctatccaggggctttgctcgctatctactccatcccccatcgaaagacggtatttgttgcgtgttcctttgattttggacacaaaaaaagattgcagccgccacgcgctgaaatctcccggtttccatattgtgaggttactcctctgctttttcgacttccgttatctctcttgccgttgcggttatactccgtatgcccttattgctcataccgtctagcagcgcgtcaaactaccgccgtgcggtggattttccgcgttgctgttcggaaagaaaaattgatctaccgaaatatgatgccgggtcacaaaatcatagaacacctgtaaactcgattgctgtcccttgttctcgatattcgcaaggtaacctggggagatatataactcgtcgcacacctttttgctattattcattcatcctattgcattctactgttcacctttcttttcagatttgtctacacagttcctattattagtttaaacaaattctgttatgtattgacagtagactattttcctgataatatgaaattatatataaaaggagacggcgtttatgttgcatagcattcgtattagataagcattgaaataaaagagattttcccatttcaatatgggctttttttgtgtaaaaatgtccgatttgtaatggaaaggagagagttcaagtattccataatacggtattaaaagattttcctcttttctgccctaaatgcaaattgacacatatctttgatgttgaaaagttaggtatcgttgcagaccgacctttttcatatatctatatactttcatataagtccgtaagcccgcatgattactgcgttttctaaaattatgcaagcataaagctccatgtagagccatacaatttcatatcatttgggcgtagaaataggcgtagatttgatattaaaaaacagagtccaacgcattttaatttgtttatgatacaccttcaaaattctgcagataagaacccatttgacagcaacaaacagcaaattagcatattataaaagcagcgtttctaactttctaaaaaggaaagaatagaaacgctgtttttatgttttgggtatgaattcggtgttccgggcacttgaattttgtaaccgatattcgctgtattgacacaatcaaaaaagataacgggacgccttaggaaaattctgcccttttgcaggagcgaagcggtcgctgctcgctccctcctctccacaccttaccccctgttactccctgtactgactaaaaaagagaatgtgttgaggctgttttttgacaatctatacttgtatgtgtttctcttttggctggtttaagcagacattcctacgagcctttttcattatctctgccgccgctttcctgcctgatactcctgcggactgcacccaacatattttttgaaaagcttactgaaatatctcggattgtgcccaagcccaacctcctgggccacgacgtatatcttgttctccttctctgattccagcagttccttcgccctctgcattctctgtcggttaaggtaggtcagaaagttttcgccggtgtaggcggtgaaagcctttcccacgtagtcctcattgcggaaaaccagattgctggctatccacttcaggttaaggcggctgtcgctcaggttctggttcacgtactcgataatttcttccacgaaatgctgtttcttctgtggcgctgcggtttcgggattagaagagggaatggccttcaatcgttctgcacagtcctgctgcaccttcatcagcgcttctcccaattccttctctccgcaaggtttcaaaagatagtgccgcactccaagactcatggctctctgggcaaactcaaactcactgaaaccggaaagtatgacaaattctgccttgattcccatctccttggcccgctttatcatctctataccatcgaccactggcattttcacgtcggtaataattacatctaagtgagaagtttccatgaagtgaagagcctctatagcgttcccacaggtgcctaccaaccgtacgccgtagttttcccacctgattgtgttcgccatagcttccagcacactcttttcgtcgtctaccagcagtaaatccagcatggtgttatttcctttctcgacgttccttctcgttttcaggcttcggcagtaagatctccgcacgggttccccgaccagtgttatatacactcagtgtgtaccgttctcccagcagcagtgaaagcctttttttgatattgataagaccaattccttcgtccgattccatcggattcttcagcttttttagtgtttcttcgcttattcccggaccattatcctcaacaaacagcagtaaatcctcgccgctgtccaacgcaccgatttttaccacacagggctccagcatattctccagcgcatgctttatagagttttctgtcagattctgcagagccatcggcggtatcatagcctcgtcccatttctttggcacctctgtcagcacgctaagccgttcgccgtatctgtacttttgtatggatacatatccctcaactatctccagttcttcccgcaagggtaccaaggcctcttttttgtaaagggtgtagcgcagtatcttccccagagattcggtgatatgggatatctcctcctgcttgcccgtcttcgccttccaattgatggtttgcaggatattaaacaggaaatggggatctatctgattttgcagggacttcaactgagcctcctgtttggcgctttttgtcagatagttttctttcaccagcctttttacctctccgaccatcttgtcaaaggagcggtcgagatagcccacctcatctttgcggttgttacttctgtaccggtcaagttcctcatagcgccccgcctgaaataggtgcattttggtcaccagtatgttaaactgctgtattatctgggatacaaacctcgagcagaacagtgtattcaccagtatggccaacactgccactgcaaaggtcaaggcgtttaaaagccgcagggagcgagtcactgagtcgaaaggtaagtacatggtgtagcttaagtcaaaagccgagtgggttgcgtaactgacaaaatagtcacgcccttccaagcggcagatttggtatccattctcggtgggctggaactgaattttttcttcttccccagtgaaactggtgaaaagcacgtcaccgttttttgagaatatggcaatatcaggctggtagttcaggtttttccgactcttaaggctgtccgatacaatactctgcaaatctatctgaagtaccagaagccctaagggccgcatattgatctctctcatgttcacaatgttgcgcacataaaaaagcctgccttcgctctcataaagcaccggtttgctaccgacccctgggacctccatggcgagctcctctacaagcgtattctccatggcataagcgtccccgataccaaaactttttccattgacacagaccgccgccgaacgtacgcaggaaagctgaccataatagttcaaaagcagatcgttcaatgcctgataggctcgtccgaatgaataaaccggctccctggtggaaaaatccaactcctcgttttgtaatatatcctgcaccgcatttcccatgagcacatagctgctggctgtatctacagcggaaagcttctgttcgatggaatcgacactcatattgagaaccagagaagtatctctataaagctccttctcgtaccgatggaacacatacaccgatgtggtcaataccgtcgctaccgaaagcagcataagcgagcagaacaccagcatgaactttgacttcaggcgtatattgagccgcttcatttagtctgttagcctgaatgtcattccggcgcttttatgttcacaatagtgtcttgggttcacgagtattgtctcctccggtatctcaccggaaagaagtttctcacataactcctccatatcccttacgatctccccggagagcggcagataatacgaggattgaccactaagataatcctcctgccggtccggatcgcaaccgttctcctgaatgaaatggcctccgtaccaagcaaagtcctcaagctcaggaagtctttttataaagcggccaagctcctctttataatgtgaaatgacctgtcgccactcgtttctgccgcaaatcatcaacacaataaaccctgaaccaatggcatcccctgtgaagacacacttatgtgcccggtctatgaacactacggagtttggcgtatgccctcccaactccacagtctcaatctgtacaccgccgcccaggtctatcatcgtgccgtcctcaatggggcaaagctgttcatccttcggggcgggggccagggttctgccaaagaccttctccatctgctgtctgttcttttccatagactcaatgtccagtcgatgaagccaagtttttgggaaacggtacgcttgagccatatgatcctcgtggggatgggttacagccacctcaaccggcagaggcgtcagactcttgataagtgcggacaaatcgccctctccaaggcctgtgtctatgagcaaggccttctctgcaccgcagatcagatacgcagaggaagtaaaataatcgtcaatacggaacaatccagggcaaagatacttcacctcaaacatgttttttctgtcctgtcggaacagccattccactgccgcatcattttcaaagcaggccgaccagatatccccctctgacacgctcgtatacctcacgtactgtccgccgcaggtacgcacggcggcgacaaggtgctttggtgacgcgggtacctttctgtcctccggttcttcctgtccaaaagcccacaccggtgtgaatttcatatttctggcgatataaggatccccgcgccctccaagagccaaaacgccggcaaagcgtctgggaaaacgagaaccgatggcccatgcagcggctccacccaccagatacattctgcattcgtctgttttctgctccaactcaaagagaagtgtatgaagatctcgtccttgttcccattccgtcaagtctttctcactttgtacccacagcacagagcaggggtgtttctcctgaaatttctcagagatgaatatctccggtcgggctttgtacgccggttcatccagcaccactaacaacggcaagcctgtctccccgctccagagctgacaactaagcttaccttttttatactctttggtttccataaactattcctccgttccttccgtctctatagattttactctttcacagcgcccattacaatacctgttacaaaatatttctgaaggaaaggatatatcaccagaatcggcaccatagacactacgactttcgccgagttaaacgtcaggctggacatagccatcttttcctttatttcctccggggacatagttgccatctgcgtcggatacagactagccgagagcgactgaatatatgtctgcagcggcagctttgaaagggaattgatataaagctttccgtcaaagaagctgttccagtggtgcactactgcgaacagggctattgtggccagcgaagctttagaaagcggcacgaagatatgccaaagaatataccaagggctagccccgtccacataggcagcctcctccaaggcagcgggtatgttcttaaaaaagttcatcagcagtatcacattgaataccggcacggccgttgggagtaccaaagcccagatcgtgtccatcaggcccaactgtcgtattaccatgaaggttggcactaagccgccgttgaacatcatggtgaacaccacgaaccacatataaaacttcttgcttttaaacaccttgggactctttgacagaggatacgccatgagtatggaaagtaccatgttgatagatcctcccagtatcactctcaacacagacaccataaatgactggccgaactgccgctcctccaacatggctttgtatgaagccagagtaaaattcacaggccagaagctaacctttcccaaagcggcgctggtgcggtcactaaaggatatagctaccgtgttgagtataggcacaagacatataagcccgcagaacagcagggctgccccgataattatgtctgacaccgccggtcttcggagccccgatgtttttttattcttcatataaaatcccctcctcagaatatcctgtacccgcagaacttgtccgcaagcttatatgccgtagtcagtagagcaaagcttatgatagacttgaaaagccccactgccgtcgcgaagctgtactgtatgttcacaaggccttctctatagacataggtgtcgataatgtctccggtgcggtaaaccagcggggaatacatattgaatacctggtcgaatccggcattaagcacattgccgatgctcaaagttcccatgagtattatagtgggaagtattcccggtaaggtgatatgcataatctttttccagcggcccgcgccatcgatgtccgctgcctcgtagagagaggggtcaatgctggtcatagccgccacatatattaccgcattataaccgaattctttccagacatccgtaccaatgataataggtcggaaccaagtgttgcttatcataaacatcaccggttccccgccaagagccgttataagctgattgattatgccagtataggagaagatattgctgaacatcactgccagtataacccaagaaagaaagtgtggcagatacaccgctgtttgaatgaaccgcttataccgtacgtttctgcactcattcagcaacactgcaaacacaattgccagcagtgttccaatgatgatttttgacagagcaatgatcagggtattctccagaatctgccgaaaatccggaagcataaacagtcgctgaaactgagccagtcccacaaactttgaaccgaaaataccttttgccggaacgaaattctgaaaagccataacaatgccgaacatcgggatgatagagaatatcacaagaaatatcattcccggcaaaagcatggcgtgataatacctggcatttttcttattatacactagataaaacctccttaaaaatctaccaaaacggcaagggcacgtctgataattcaggcgcgccctctccgcaggtaattttttatattatccctggtcgactatggcctgaacttcttctgtcagagtgtcgccacccaaagccttccactggctgacaaactcgtcgaaatagtctacaggcttttctcccagaataatctgaagatacatttcgtcctccagcttgtccaacgcggcctttaatgtggtggaggattctgtcacaaagtagtaagcagggtagacaggattgccctcctcagtaacattgccgcctacataacggctccaataagcccagaagctcacctcgtccttgtcgccatcggcaaatctcttggcggcaatgcactggctcttgtcataatctgtcatacccggatattccgtgtaggagccgttctctacgttatccttaacgcaggcgctgagcttcggcacgacgtcgaaataatcaaaagtgagagcgcccatgacattcaggcttcttgcacccgcatcatctacagcgccgctgacgcgcagttcctgacactgttcgccgtacttgcaggctatctcgtcatttttgtcataggtgccacgcacaatctcgttgttggccgccaaagctataatagctgcctcagggtgtttgcattccttacttacaacgctgacacattctgtgggcgcgccagtcatatagttgaactcacctttgctgttcaccggaccggctactgccacatactcgatatcaggggtattggccagagcctcgttggcaacagcgaaccacggcccgaactttgctcctgcggtacccgaggcccacagagcttccgtctcaccggagccaatgcgagtggggaactgcttgtcaataagcccacgctgataccaatcagccaagagagtcagagcatccttcatcttgggatcggtggaaccgtagtagacttttccctcatcgtctgttaaccactgagtcgggaatacatcaaaagcgttaaacacggactcaagaccgtagttgttaccgtagccgtttacaggatttgtcgcctgtacaactaagcccaccgtatcgttctgtccgttgccgtccggatcttcgttgacaaaggcctccagaaccgccgcaatttcatcaagggtcttgggcacctctaagtcgagagcatccagccagtccttgcgcaaccacagcaaattctgtgcatagcccagattacttcccggaacagccagttgtttgccttctaccgtgaccgcctcaatatttctgttttcaaagctgttgtctaccagctccaaggtcgctcctcgatacttggggtatatctccgtcagatcagccagaagatcattctcagccatctgtctgaaagtgatatacttgtccacgaacatcaggtcgcacagttcaccggaggcgatattgatggagagcttgttattgtattcggaaccctccgcactccaagccagtttcatctcaatattgtagcgctctttgagaaaatcggtgctatagttttgctccggcgattgatctgccggaaatttcgcgccaggatacatgacgttgctgtatgtaatggtcaccggctccttatatctgccgttttcgtcgaataggtcatcgctagccgagacggaagaagaggatacgttttcacccgaagaatcctttcccgcttctgaagacccagaagcgccctcaccgcatgccgtcaccgaaagcatcagaagtgccgccattatcagggacgtcagttttttgcttcttttcattgttgttacatcacctttcaatcattgtcctcccgtttctcacttcccgggtggttatggctttagtatattatatttttgcaaaataatgaagaaacaaatccgacatcgtttgtacacaaatccgacatatctttatcaatagtacgtttttttttgtaaataaagctctatgagacttgaccgacagacaaaaacaactaacatcacctgccgataatatccaatttccccacatatttacttttgtgtgtccggcctcaaaagcaaaggaaaataaagagacagcccaaaacaactttttaaatctacactgcttccattcgaaacattcgaagcagattgttccactgtctttcggtgcatccgcagaacaggaggaaacgccactatgagcgacaaagaacgaaacttcacatgtgatcttcactgcaaaggagccgtaacgccgatgtgtgcgcaagtcgaagcacacgtaccaatccaccttaaaatgacactaacgataaaagaagcggcggaatacagcagcatcggaataaacaaaatagacgccatggatttcaacctcctaatcatgttcggtgacctctgttactcagtgccgattcagcttgcgttgttatacgaatgtgggagttgactcctttaattcaacctacataaatcgaacgatacaatgagaggcggctgacagtttgctggacgagcgtagcagctcatgcatcgcctcgtcagaccgatccccttcattataccttaggaactgagcaactagaaaaaaatttttgatttaccacagttaaatttacaaagaaaagagaaaaccatgtttattcaaaaatactatcctgtcgccgaaataattatatcgcaagcatcgccgttgtgataccacaaagacacttatcagggaaatccctgaaccctttctgcttacttcagctttatacgatttgcaaactttctaaaacaataagtaaaggaaaacgcagcagcttgtgatatgtacccggttttctagat
